United States Patent Application Publication US 2022/0167576 A1 - sequence listing, part 12

SEQ ID NO: 30 - DNA, 35937250 bp, Oryza sativa (residues 23,253,517-25,367,472 of 35,937,250)
  misc_feature (5969519)..(5970518): n is a, c, g, or t
  misc_feature (13681864)..(13682863): n is a, c, g, or t
  misc_feature (13684155)..(13684254): n is a, c, g, or t
  misc_feature (18795366)..(18796365): n is a, c, g, or t
  misc_feature (24815509)..(24816508): n is a, c, g, or t
  misc_feature (35936251)..(35937250): n is a, c, g, or t
gcactcactcgagggtgagtgcgctgccgtcgagcggttgtgccgcggcgccccctccttctttctcttgcgggcgtgcgccgtgccgagcggcgtcgccgacgccggcagccttcgcgccgccgcgccatggccgacgccctcgcgccgccacgccctctattcttttctcttctcccccccaccgtctcacccctccacgcgagtgaagagtgagagaccggcgacgacggagatggtggcgccgccgcgggccccctcgccggcgcgcgcgttcacccgcgggtgcgcgcgcggctgtcgagtggctcctcggcggtgcctctttgcccctctccccctccgtggccggcgtcaacgacggccggcgacgaggtaagattagggttagggtttcgatcttttcgatacgttggatcgtttgcttttctttgctttggatttctttcttctctgtggatgtctatccccgaaccaaaaataaacgctaggatggctctgataccattgttagtgtttcctattggatcacctaggtttagatctagtcgggtggttctatttgcgatggatgattgaacaacaatagagaataagggaaagggtttagggatgtgaccggttgacgcgttggatgaagaggaagtcccagccatcgtcgttgtcgtcgctctgcttgacgtgggcggcggcggcgatggcggtcgtgacggcgacggtgctgcgcggcagtggtggtcgtaggggatcccggcgaggtcgtggcgcggcggtggagtcttcccgtcactggctgcgccccctcgatcggttagggtttatggggtggagtggcggcgacggcgacgaacctcgttccttgtgtcgttatgccgtcccgtcctccacccctctttatatggcacagtgtgacggggcccaccagccattgggctgggcgcccccgatcagggcgcgggtcaaggcccccttgagccgttgggctcaaggggagggagatccatctaacaaaccaatcctcctttattccgccagcacttgactgccccgaccgatcgagcgagcgaacccccaccggggaagccaacttttcccgggttgccacctgcgtgcgcgaagcacgccagtaatcccatcccatgagatacgggtgtcactagctgccgcggcgccgggagaacgggagctctcgggctctcgcctgtgccgatcgatcgctgcgtccgtcgccgccatcggtggttcgacgacccgaacaccgatccgacggcaatacggcatcggccaacgcctaacgttgcgaggggtttaccgtacggttttcgtgcagttctcgtagttatcttgtgcggtaattttctcggtttttaaaactacggaatacctcgtgttaatcacacggttttcacggtaacaacgcggttaccacgataactgctaaactgtagtgtgatgataaccccacccaaaatggtttggtgaaccttggttgcgagaccgtggactcagttagaccagccagttattagaccgtggtgtcttgtctacaggtaaaaaaagggaagggagtctggttccaaagtgccaacatcttattcaagtattcaacacaagttcaatgccttgacctttgcattgttgaagtccacaatattgtcagcttgtcgtcttggacggcaaggctatatatatacattacaccaattggtcaggacaagtatgcagcacaacagccaacccaaaaagaaccatcatctcgtcagtagtggagggcgcctagaaccgcggctttcacacaacctggtggccagccagcacattgttgtcgttgcaaccaaaagaaaagccatagttcctgatgcctgcacagagtcatgtgaacatgtgagctgcaagaatttccctgatggataaaacgaaaaatatggcagcaagaacattgcataaaagcaaaccaacctaagattatatttacagagggagcagagcagccatgttctactgaagatggtgcacccagctagagcacttgccatcactttcttgtgatataaacctggaacgcaagctcatcttcgtccatctctttcacaaacttgcagacatccccagcctggaggttgtttgctgcagcaaaaggtttccagcccgcggtgaagcctacgaagaccggtttgtcatggtagaagaccggccatagcctcctcatgggatccttgaggattacgacgttccggtcataccttcctttttgccgacaagtgattggaagcgatttgggcaactcctgaacaaagacagcaaagaaagagcagttgtcaatgggcttgccatactcatcaacagtgtcaggagctttatagcgttattataggcaagtgtaagtcaaaactaaagttttatgctgcatcaattccttattgtgatcttagtagattgatgagtatgcccaagaacaagtagctactgacctactgtgatactagtagaggggtatcttttacagcggcctaaaacgaattaagacaaatagaaaacacacgaattcaagcctcaacaatacaatcataaccagcaatgagctattctggagtgatgcttttttatgtggcctagataataaacagatgtttccaatccaaacacaccgccctcactgcaatcagcatgaactcaacaaattgcatccattgcacaacactgtagctgaaaaccttcacgaattgcataaggtggcgcattacaatctagagatatatgattgggtttctgctgacatggccactaagattgcatcttggcaattaacttattacttcctctgtcccataatatagcaacctagtaccggatgtgacatttcatagtacaatgaatctggacaggaggaacctagtaccagatgtgacatttcatagtacaatgaatctagacatcctcctgtccagattcattgtactataaaatgtcccatccggtactaggttgctatattatgggacggagggagtaattgtttagcagtattttataaaactatatttctatggttttttgcactgctagataatattttaataattcatgtttgtatttgaaagtagaactctactccttatataactcttgcacctatttctgaaaatacaactgtacaacttatacgactctttaatattgactcaatgttcttcatcccaacctaagtcctcccttcatacctagcggctagcagccaacaccacccagctatcctccagcggtgtttgctcgtcatggactcggaccacgacaccttacgttgcagatgggtagatccatcgcaatccaaaagtgcaagtccttatttttcactcttggtgtggcattttttctatatactgctagtatatacttgcagtacaatgtactccctccattccaaaatataaggcacaaccacttttgttaaatgttctataatataaggcatgcatacatgtaggcaattaactatagcatcttctccattaaattattacttttttaaatcatccactctcatgttttctaattctattggatgcatgcattgtatttattaggatgatccaaactacaagatgataataattatttcttggtctttgagttatgagtggttatgccttatattttggaatggagggagtaccgtaaaagtcctctttttctatcccttgattccatgaaagcagatatgatggattattctgcccttgttttaataaaatactaacgagctgcaaaagaaattgtccatgggatacaaacaactcacaagccatttctgaatggtagaagggatgcagaattgaagggaatgatcatccagatccaggagttcagccttagcaggcagcagagccactggggttacacaactggtaaaatttccattttcctgctgggggatctgaagttctgcatgggtgaatttgagtgcccaacaagaaacacaaaatgaaattggtcagcctctccttaattttacaatgaaataaactaggtaagttcacctgattgatgagcaaatacacggttgacagacactgcaattttgtccccctttctatttccgctgctaccagttggtttcaatggctccttttttgtttgcagttgaacagtagctcctaccaaatagacaattcagtacacgctgtaaataaaaattatattcaaactaaacaagctaactttgtaaatgttagtttcaggcttttgagaaataaaaatagtttcaggctttcagacatcataggtattatgagaagtagcacccttccacctttttgattgaacaaatggttgacctctgtcctgctacgtccgcatttggatattgatacgctatcaagaatcgagagttcttcaataggtatgttgagaattggtttgaggcaggtatcagtaacatcagactctatccgtagatcaactggactttctcccattgcaccacaattaccaactaacttctctccagctttttgtgttttttcaggtctaacctgtccaatgtcatcaagagctgctcgaccgttcacaataccccttttccacttctccaagcaccgagtacccgctggagcttcatatattctgaaaatatttccactaatattcatctcactatcattaggatatttatcaacagctatgatagaatttacttgaacggaattcctttgatgtttctgtcctaaatctttatctgaatcatgagtttctgatgttgttggaatagcagcagcaagttcagattctcttgttgtgcttctgtcttcctcgaagcaagaaagtgtatttaacttcaccgtatcaatattttcttgtgttaaaggaattacaccggtggttggagttatttcagatccatttgttttttctgtgctacatgctggtgaaatattcttgtttttgggctctccaaggatcaaatttcccatcttattgtttagtgctactgaggattcacaacaaacaccatctacaactctttcaaggtctttttgtgtattgatagtcacatgatgtatttctgaagcttcacttggtgctgtttgcttcatggtatcctcgtctacttgtgttgaataagcttcatcacttattataataacctcagatcttcttgttttttcttggatacagaacacagagtcactccttgtatcacactccccattgcttaaatttctaaccttattacctagtgcccctaaggatccatatccaatcccactttcaactctttcagagtcttgtgtttcggaagctgcatttatagatttagcaactagattcctggtaccaatctcagcatcaactgttattttgggctctttgctcctaggagattcaccagaaacattggggccatcgtgtatgtcttcagagtcctgatactgaccattataatgtgatatcaaatcatcagataatgtatgcctttctttccttttcttcacagcaccttttcctccgcttttgacactgaaatgtagtctttcacaagaatcaataccaaacacccgcacagaaaatgttgattctggtgtgtactcaaataatagaaattcaccccacttaatacaatgttctgaaacgaaactgttccatccctcataaaaagctagggaaccatccaccaccgatagcctgatctttgaacacttcccctctgagtcttcaagatatacatggcgatcaattaaatccttaaggctgggtgcaactgctggtggtatgaactgcacaagaataaatcaacattatgtgcatataatatttaaggataatcatcatggtacagtacaagaagaaaaaacaatgacaaaaaagacactaaaatgaacaagaaaaaacagagctgaaattacggagactttttagggtgcttgagagctatggagagatatttaagcagcgaggcaggtgccaacttaaaaataagacagaaagttggatacttcatgcatccatgtaaacagagagaaaaagaaaacataactgcttatctgatcctttcggccaaaatatttttttatcattatggtcgcaacaagaaagatgactagttgcttaatggccatgtcaatggcagcaaaaggctactacagcaccataacgatgcactacggagaacaggccatacattcattgggtttttttctgattctccgaaggttacaagaggtaccactccaaggagagctggagaggtacataagtctccaaagatgagagaaaacctccacacgatgttataaactctggcacctcttgctcttggctccttttcaagaatggtaaaaaggatgtaactgaataatttacaaggtcaaattgaaactgactctgttcgtacaaggcctcttcatcattcctctgtgtagttgatttagtcctggttgtcaatggcaggcaggattgtagaaagaagaatacagcatatggtcacctttaaattaaccaatgaccgataatattagatgatattaatttccaagtaccttccaagtttcaagcacaaataaaagtctcaaggtcatggatagctaattaaagaagagcttatgagcaacagacataatcaagtatgtgtaggaattagaaatctgcacacaccagtaattcctcgaactcgtcgcgcacaaatttgaagaatgcgaaggctgctttccttttcttcttcttgccatccctacaattttttttctcatttcctatagcaacaatacaagccttcttcgtctcctttttattgtcactgctagccactcgctccttctgctccctcttcaatggtgtagatggcgccttcctcttcttttccttgtttttagtgctaaatgtctgagctgtcctctcatcaggttgaacgaatgatgcatcccgcttctttttcttcatcttcatctccatactgtcactaggtcgcattttcctctcctttgcaacaagtgtattagacaaagtcctcttgttcgttccatctttctccatcttacccttgttgactgagagcggcactgtcttcttatagctgtcaccgtcactcttcatattcttctcaccattctggttgctcgtgcgctgcatttttattttccgcatcttttcaaagaatggagtggtcaccttcctactcttagccttcttgtcgccattcaacaacttcttccccctttgctcagcatcgcttccagccttcctattctttctccagtcactgtgtgacgtcgcctctttgctggcatcgtttaccacactcttcttcaggtcatcactgcacttcctcttcctcttcctcttctcttcatcggcatcatttcgcgagttcttcttcatgtcatgacgactgcgcttcttcttctcttcgtcatcaccatctcgcatgtcatcactgctcttcctcttctcttcgtcggcatcatttcgcaggttcttcttcatgtcttgacgactgcacttcttctcttcgtcatcaccatctcgcatgtcatcgctgctcttcctcttctcttcgttggcatcatttcgcaagttcttcttcatgtcgtgacgactgcacttcttcttctcttcgaaatcaccatctcgcatgtcatcgctgctcttcctcttctcttcgttggcatcatttcgcaagttgttcttcatgtcgtgatgactgtacttcttctcttcgtcatcaccatttcgcatgtcatcactgcagttccggttcttctttttcgttttgttgaagctcctgagcctccccacgcatccctgccctcgaacagcaccatccatccttataaacaccaataaatccccagtacagtctagtctaaagcaatcactgatgaatctctccaatcacctggaacaaacagcggaccaaagaaagcatcaaatcagcagtaaaaacaaaaatgaggctacattattgacaggaagcaacagaaaaaagcgtcacccgaactcaatgtgcgatactgctcaagttcacccccaaaatgtaataataacctctcaacctacttcctcgtctcagtcatccctcattttattcatctctctcattaatttcactccttacattttgcaacagatggagtagcatagaaggaaataaacttagggggtgtttagatccaggggtgtaaagttttggcgtgtcacatcgggtattatatagggtgttcagacactaataaaaaaaactaattacagaattcatcggtaaaccgcgagacgaatttattaagcctaattaatccgtcattagcaaatgtttactgtagtaccacattgtcaaatcatagagcaattaggcttaaaagattcatctcgcaaattagtcgcagtctatacaattagttatttttttagcctatatttaatacttcatatatgtgtttaaaccttcaatgtgacagggtgaaaaattttagggtgagatctaaacagggccttgtaatcatcttctagccacaactcacaagagcagagcttgaactttacctacatttggttctagaaacagtattgccgggtcgatgtccctctgaccatctccgagcggaaacaccaccccaaatgcaccttctcgatcttggggataacaccacctcgagttggacagaccagcgctgctaccgcgcttccccccgatgcggaagctgccaggcggcggcggaggggagggagaggagggggaggtggatggcgcggagcgggaaggagaagaggcggcaagccgtctcccgtctgggcctcttggggtgggtcgtcgtgggagaaggaaaaaggcggcaagcccagagcagggacgggcggatcggtggccacgctaggggatcggacgaacgtgatgcgatgttgcgagatagggaacgctgctcgactgctcgagcctccgggggtgggcggtgggacccatgcctcggaaactgttacgcgccataaagtgttataatggcgcttgaccaaccatggaaacttggcaagtgaccatccaaaaattatgattttctttttcttgtgagtggttagccccctataaaaataccttcgtcttattaaaaaatttatgcaaatataaaaaaagaaaagttgtgtttaaagtaatttagataataaagtaagtaaaaaaataaataataattctaaaaaatttttaaataagacgagtggttaaacagtgcaaacaaaaactcaaaatcccttgtattatgggacggagggagtataattttttcttcttttgttttgaaattttcctatagcttttatgacaaaagcttttgttttatttttttcttattctttgagaaattgtagttcaattaatattgatgtttcatcctatagaagttgtcccctccttgaattcgttcaagatcagtagccggctcactcaacgtcacaatggataaaaccatcgttcgtaccgttcaaagggataaaatctattagttttaatagtcgagggacctccattttcatatataggtggaaaaaattaaaaaacaatcccataagtcacataaaatttaacattctacctcataaatcattttttttgcaataccctcaacttagttttgttgtaaataccacccccgatgcgtacgtgtttaatcgaaacaacccgttatccctaatatagtattattaaattgattcaattaagcacgtgcgcattggctatcttggggtggtaaatcaaaacaatcaattttgtccaagtgtttgcattatatttattttctatatttgtttgagctttttttttcatacaacaaaactcagtacgataatgtttaaactctcctcaacaattttatttgtggaatattaaaaaaaatatcaagactatactctgaaatgatttagtttcagtaaaagccaccttgacagctcacactttatgaaacacatgttgattcgattaaacatatgaatactatgatggtttttaaataaaactaagtaggttggttgacacttgaaaagaataatttatgggatagaatgtaaaactttcaaataacttatggatgttttttttttgcaatttttcctatctagttttgttgttcaaagttatcatttaggctatggctcattaaaatttataaaaaagatttagggcatatttggggagcttaacattatgagaagcatctggttggtagctagcttctaagaatttagaaaagtggggtttcccagcttctgacttctagttcattttatatagtattttacaactacaacttctcagaatctgaaccaaaatctagggcctgtttggggagctttagattctgagaagcagctgtttggtagccaacttctgagaatctggaaaagctttgaaacccagcttctggcttcttagttcattttttagaatatgtaattacagattctcagaaactgtggattgtttgaggcagcttctagcagaagcatcttttgggaaaagctgcagctgggataagctccccaaaaaagacctaaactgattggaggcttttgattctgggagaagatatagaccctctctgtttaggcttaagcttattggcttagacttttaagtcagcttattagcttatatgatttataagccggtggatttaatatcctaagtttaatggtggagtcatacatctacctcacataagccaaaaaagcttctccaacctagcttttggcttaatagtgttagagtggcttatggcttcaaaaaagacaaacgaaaaagccgcttgtttgtttagtcttagacttttcggcttataagttggcttataaacctaaacaaagagggccatagtagaagctctccaaacagacgcttactttcctacgatactcctatcatttactccctcagtctaaacactcaaattctattgataaatatacagttagaatttattttatttacagattgaatactagcaaccgaaacgtttacactggtcaacgggtcggcgaaaatccaccaccgggggcccgacacgaagaagtacacgcgatctcccgggagcccggttaacacactccgccacgtggggtccgaccagctgacaaatgcggcaaggtgacatgtcaccctcccatctcccactgagtcctgggtcccactcgtaagcacagtctcctccaagccttcgccgctctgctactccacctccacctccatgcaccctggggatcggggcccacacgccatcgtctccaccggaccaaacatccccccaaatttttctttcttcctcctcggcgatggcctgatcggatcccacccccccccccgggcccagatccagcgccgcccgccgccgccgtggccgccgcgatgggcgaccactccgactccgactcctcccccaagtcctcctcctcgtcgtccgcctcttcctccgcgctccgccgctccccgccgcgcgtccgggtacagtccgacgagggcggcagcagcgacggcgtcctcgtcgagctcccctcccaggtattcccccgccgccgccgccgccgtctcggccgtccttttgtcatggtacctggcttcgcgtgaggaggacggcttatggaagcttctgctgctgcgtgtaggaagcgcggagccccggtgccgaccccgacggcggcgtcctcgtcaacatgcccgccgacgacgccaccagcggagagaccttcgaggacgcgccggacgacctcggtggctcccgctccgcccgctccctcgacgaatctatcgctgtcatcgatttccccgacgagtcgagcttagccgccgagtgccggaagtacaaggtgtcgcttcgctttttgcctcatctacccagtcaatagttgatgcgatatagctaatagtttgtaataatgcggacgtggaatgaatgaatttggttcaggaagagagggaggtgtttgcacgggaggctgtggcgctccgagggatgctgcgtgagcttgtgggggaagatgcttcgggatcgttgccggcggaggactctgatgagagggcgtcgggatcgctgacgccgctgcactcgatgcttgacgattgctcgagacttgtacttgaactgaactcagtggtgcgtgcgagggagcaggagatcgagagcttacgcggtaggtctgcggaggttgaggtgtcgagggaagggtcagaacaagctattgggagaattgttgcttctgttgatgctgtggttgggcaatatgacgtcagcagtgagggtgctgatgaagaggggatatctcttgttgaaaggaagacttcattgctggcagagaggcatcgacaaatcttactggatattgaacaacttgagcaggttctagcagaggtacagcctgattttggggctacagggcaatgcgatcatgctaccatcttaggtattgtttcggaagaactggttaacagcaagaggaataaagcagatttcctgcagaaggtgaacacttttggggaagaaaacaagaatcttgctgaagagcttcagagtgtgaaagctgctctggatgtagtgaatgctgaagcaaaaaaggcaaaagcagagttcgaacaggtggagcataaattatcgacaactaaagaaaagctcagcatggctgttacaaagggcaagtcgttggtgcagcatcgtgattccttgaagcaggcattggcagaaaagacagctcagcttgatgggtgcatgacagagttgcagcagaagtcagatgccatgcaagcagctgagagcagagttgaggaactcaagattttgctggatgaaaagtcgaatgaacatgagcaatgtttggatgagcttcgagaaacatataatgcatgggaagccgctaaggctgctgttgagcaactgactgaagaaaacactgcacttacttctgttcagacttccctttcagtaaaggatgtgattcttcaacgcattgaaggggtaatgtcagaagcatcatttccagaggatctgctttccttggagatggctgacagattggaatggctggttgagcaaaagaaaattgctgacatgatcttctcagagcatcggaaagttaaagatatcctagcctcaactgaccttccacatgcagtcttaactggtgagctcgattcacaaatccattggcttctcaattcactgtaccaggctaaagaggatgcagcacggatgcaggatgagtcctctgctatgctgcacaaactggcttcacatgaatccaagttgaattcaatgcatgaggaagttgaccgcttgacaatagctctacttgaagagaagcaggaaaaggacatacttgcaaatgaacatgctgaattgatgtccctgtaccatgctgctagtgatcaattgtctgttgtctcgtcgcggtatactgagcttgtgaaggcatttgcagaggtttctgatgtccaattggaagaccatgaaatcctggacggtggcaaattagttgaacagtgcctcgccaacatccaaggaagagcaaagtcctctcctgttgagtgtgaaagtttcgagaagcttcaaacacaagtttataccctagatcaggaattaacattatgtaaaataattcttgaagaagacaaggctgatagatctgagatgatgaggctatctggtgaattacaaagaatggtacaggaaactgacgcactgaaaaatgaaaaggactcattacagaaagagcttgaacgggtggaggaaaaatcatctttgcttagggagaaattgtcaatggctgttaaaaagggcaagggtttggtacaggaacgtgaaggactcaagcaagtcctagatgagaagaaatctgacatagagaagctaaaacatgctctggatgaaaagaatgctgaattagaaaacttgaaacaaactcttgatggaaacaactctgttttagagaagctaaaacaagcttgggatgaactgaactctgaatcagagaacataaaacaagctttggatgtgaaaaactctgaggtagataagttaaagcatgctcttgatgagaataactctgaaatagagaatttaaaacatacattgaatgaaaagaactctgaaacagataagctaaaacaagacattgatgcaacatacatggaaatggagaatctaaaatatgagatagcatcaagagaatctgccattacggatctcagagagcaagttgagcatctgtcttctcaggtcacacactctcaaaagttgcagttggacattatttcccttattgacgaaaagggaaaagtggaaagcatgttggcagaagccaaagtttcttcgggtgctctagttgaattgatatcaagcatttctcttcctttcgatagcccatgtgaggatcctatcgacaaaataggtcagattgcccaatatatcaaggaatcacaagttactaagagctctgtggagaatgagctacacaaagtaaatgaacaagttacctcacaagctagccagcttgctgatgccctttccagcctaaaggtattggaagatgaattgagtaattcaaaggagtatatctcttctatttctgaagaaaagcggcagatgcaattgcatactgctgctgtagaagaggagttggagaaaacaaatgaggaactggctatttatgccagcaaattcgaagatgccaatgtaacgattaactcactacaagatgcattgtcacaggctagagtgaatatttctgttcttgatgctgaaaagaaggaagctgatgccaagcatgaaacagaaactagtgctcttaatgctaagcttgccaaatgtttggaagagttggacagaagtcatggaaacttacaaagtcattcaactgaacatgatgtttaccttgagaaacttagtacacttgtaatggataacagcctcttatcattaatgactgaagaatttggaaagaaggtcagtaccttgagagaaatggcccttattgtgaggagtatgcgtgaacagcttgctgcaaagggttttcagattgacccaacaatggaggtaaagtgcccctcctctcctggcctcaatgccccctccccccaccccccaacacacacacacgcactcaattgtatgactctttgtttaaatgatttatgattttagcgtttgtgcttttcagtgtgtttatgttttctattgtaatacacagctttctgaagttttagtataaagttaggaccttggtactgactccatcttaccaccaatcaatctagctaaattcttcttctaatcataacagttactccattatacatgtacgcaatgcagttctcgtgttatggatctgttgatcttgtaactccagaacaattattgtgtttgtaactgtttcctaattcctaacaatggatacggcggtaaaatgacttgagacttgcaggctttctgttttttaaacttttagatatttcagcgagggaaccaaaaaatgtttttacctgacttacactttatatatctcaaattgtgccgattgacttggcttaatcatgtcaaacataatctgaccatttcatatgttcataagcaggattcagaatcgggaatgcttctctctttcccagactacgataactttgttactgaaagaatggcaagcagcaaaatcagaaaaaggaatgttgatggtgctttgtccttctctactgttgttgaacagttgagcaaccaagctgaatacctgtctgagatttttaaagacttgtcaggttacatggatgaaaatatcacgctggttcatcactctttgcagttggcaagtagcaaagttgctcatactctagaagagcatgacaccttgaggaatgaattgcaaaacaaggacactcataatagagctcaagaatccgaattgctttctctacagaaagagttgagggcaatgtcatcaaattgtatttattgctaccaacagattgaaaccatttctgatgatcttcttgaactaggctatgcaatagaattggcaacaggaaactccagcattgtatcaaaagttgaaggatcttcatctgttttgaaggatgtggatgctagtgattacactaaggtttcagatgctttagtatctactgtaaacagactgaagttggagtcagaaaagttatctaatatgaaagaggcagtgttcaccatgttagatgagttaaaaatgaggctgaaacaaactgaatcagctgctgaaacttctttgcaggagcatgagctgtatgtaaaaagagtatgtgtgctggagaaagatcttgaaacattaaaggatgagcgcaaaggaatggaaataaagatccaagagtaccaggaaagggggaatatgttgaaggcaaaagagatagagttgctgtcattagagcacgcacaaaatacaacagagagaggtaatttctcttatgcaactgccaacgggacattctttattgacaatttcctacttagaacctatttacttgttttattcttgtcctaactctcgtcctctgtaaaatattcaggtatgactgaggttatttcaaaggatcaattggaagcgcttgttgagaaaataaataagttaacatcatctgctgagtcacatttgcagagagaattggctatgtcctctagtcctattgaaaagctcttcagtctcattgatgaagtttatgcacttcggcacgaagtagataccttgagatatgaaaatgaagatttacatttaaatcttgaatcccatactcgtgaaatggagcagctaaaggaggcatccagaaatagtgactcaaaccgcagggagctggaatcaaagagtagtgaactacttgagataacagttagtatggaacgaatgattcagcgattaggatatcttggaggaaaagaagcactagaagataacaagcctacaagcacacaagcactcttatcaaagctggaaaaactaataattgcctcaaatgtggaatctgggaatgccaagtctgtaatacaggaactgggagcaaagctgcaggtcagggaaaaggcaattgatgagttgtcaacaaaagttaagatgtttgatgacttgcatcatgctcggcttgtgcaaccagaggctaatatggatagagcatttgaagcatcttcctcagcagttggttcagagatatctgatgctgaagatttggtaaaccttgtctgtctattatcttgtcaattcttttcttttgctccattacctttttagcatatgccatttacactcctaatattattagatagtagtattactgttctttcgtgtgatttccctggccacaaatcttatacatgcattttttttttgtttctgatactacacatgccagcacatctcgtgaagatgtatgaatattccatctatgctttggttgtaacaatagagtccacttctctgcagggaccagcggggaaggcatcaatttcatctgtccctacggctgcgcattctagactaatgcgaaaaggctcatctgaccatcttgttctgaatattggccgagagtcggaacgactaattactgcacaagattctgacgacaaaggtaacagcatccttttgtgttgtttaaataatcatttttaatgtgtcattgacagtgctgtatttgctgtattgaagggcgtgtatttaaatcactgcatacatccggcatgattccagcacaaggaaaacagattgctgatagggttgatggcatctggtaagcagcttacacttcaacagacaatgctgtcaaacactgatgggattatgttgattttttcgtcgtgttgacaattatgatcgtcttctgggagtagagtagtgcttcctacgagttcgtagctcgtacttttctacacgttttaatattttatttgcctttagtctaaccacgctgtatttttctgtagtctaactgccctgtatttttttctgtagggtctcagggagccaaattctgatgaaccggcctcgtgcaaggctagggctcatggtgtattggctcttcttgcacctatggttgataggcagcatcttgtgaccattgccctcgtagcataattgtacaatactagcagatatattcacagttttattttctttcttcttaacttaactatacctggtacatatggcattcttttcatttccctgccctctgctctgaaattgtactcgagcagtacgtgttgagttccgcacacagaatgtaatacgtgcagaatagaacaatactagtaccattctttgttacgctgtagaagtggatgtttctgttgtaaccatgataaattcatcatggtttcttcgggaagcatgatgggaataatatgaaattgaaatgtttcttggttgtaatgaaagcgttcgaaagtttgagcttattttcgaatcatatcatgctccgtaggagtacttggcagttggctatactcgcttcatccgcttttgatgcataattcgactactttatgtcctatctttgggatttgtcaaaagtcaaaactgagaaaagttagttaattgctgtatcgaagaaaagaaatatgcaaaatttaatgacatcaattctaaccttacaaaaaaaaaaagcttaggctgagttctcatctccactttcctaactcacatatctcgttttccacgcgcactactttcctaactcacatctcttgttttccacgcgcacgttttttaaattgctaaacgggagtgagggtcaatagtatactaccggtagcatgttctctaaaaagtacaattgaaattcgacattttaattccttcaatttttttttatattctctaacacatcttctctaataaaagttcatttgaaaatttgatattctcaaacatacccccaaatttttatcttaaccaacggcagccaaggcgggcaaaactgtaatttcacctccaaacaaaacccccctaattactcttgctccaaaacctccacccttctcaagcgctctctcgtaggttcgtcctgtgtttcccttcccccgccccccccccttcccatggcgagcaacccaagcagctccgcggcgggcggcggcggcgaccatggtggcgcgcgcctcgaagacctagcactggacaaggtggcggaggcggccgacgcggtcgccgccgcgtcgagcgccggcgaggtcgtccgcgcgatccacgccgtcgcggccatcgtcttccccgtcgactccgctaccgtagccggtgaggctccgaatcctaatccgacatgccccctattcccctttatctcattcgctgtcacttggggtgtctgatggcctctcttgtccgcgtgtgctctcctgtaggtaccgtggacgaacccttcaggagccaggtgaagctctgtgctaattctaggccttttatttcgtgcatctgagaaaaatgacttgtagttttatcattgctatttttggttctggcgcaaacaatgatgtgtgattgctaataatcatggaagggtagccggtgatctctacaatgcaagtcatggatggaatccacaagtcaggcgtttggggtgttgaatgctggctgttttgctgaatgtcttcggtttattttcatctttgagctgctgtagttaacatggctgtcatgttttgggtcaggccccatgggcttgtgtgatgtttagtttctttacttgctctgaaccttttgtaagaatcttatcatttcgttaatgaaatgggagggtctccgctctctgtctcaaaaaaaaaaaatcatggaaggggtctgtgataaaaaaaaaggaggtcttgagtttttgttttgacttgcaatcacttaggactgtatgccgaaatggagcattaaggtatcatagtgaacactattggttacatggacaatatttcagccactgtattgtcataattgcggtgcatatatttgaggaaattgatctctggaaggaattactccgaaactggattgataagcatccacaaaattttccaattgataagcatcaaattgataaacctatagctttaataatggtcacacaatgggtaatcaaattgcaggaccttgctaggtgagctgtagcagcatactccctccatactcacaaaggaagtcgtttaggacaatgtttaagtcaaaccttgggaatataaatcatgaataactctcaagttgttgagtttgaaaatgtaaaaattatatgaatatatttgtcttgaaaaatactttcataaaagtatacatatatcacttttcaataaatatttttatagaaacaagaagttaaagttgtgttttggagaccgtgtcgctgtcctaaacgacttcctttacgagtatggagggagtacattttgtaaaacctgtgtcatttgataattcattcagaatacagaggatcaagtttcatgcttgagagataaattagtatggatattcaaagacacatgcttccttcaatatgattcagccaaatagccaattggagttccatccttttaggccatgatgtaacagggagaattattttctgtactttcagattattaatggtgtaagcctcagcagtgatgaacggggatcttggaggcatgctttttgccatggtccagcgtttcctactctatctaagattttgcttggccgtaagtttactcttgaatttgtcactgcaaacatacttgtaccattgatatttttttcatgtacaactctcccgtttgcttataatgttatctgccagctacaatctctacaagtcatacttcatttgtattgtttaccaatctctacaatttgattactatacgcttaaaacttcttgattgttcatcacagttaggccatttgcaaagttccttcagttataatcccattctcacactttggttgtccagatgttgccttgaagtggttacatcagattcgtgcctgtgcaaggaaggaaatctgtgattccttttttgtcaaaggatctccaactgaagtcattcaagctcttgttcctgctttgtctcataaagtaggctctaaggaagatcataacattatatgttcaaacattgaaagcttattaatgaacaatctatcaattctatttcattacacctgaatcttttattggtccaactttgtttgcttttcctataagtctatagcacatccttctttttgacaactccctgtgagttcacaacttcaaatattatacccaaaccttgtaggacaaattttcaagtttcaacacttcgactgcatgggtctgtactaatatcatgtatttgcccaatagtctgctttgtattcttaagtctattttatgctcgagtcattaggaatcaaacaatctagcatgcacacttcatctgaaaattcatgggcctgttcctatctggtatcttcctttttttttctcacctgataaccatatttgagcttagtttgtcattattttcccacatttcaggctgttaattctatgttttgtcgagaataagggggtcagccagattattgcagagtttactgtaagcagcaagcacgatgatcacaacttgaacccaggcagagcagctttgatttcaagggttgctcaactacttgcgtctgttccagataaaacaagaatgggagcttcacctgcactgacatcatcgtgtcctcacccccactgctccaaacacaaacatctttgttaattttttttcctttccttttattttgttagctttttctcagctaatacgtatttatttgcactatgtttgttcctccaaactgtaattccttgatggaaaccaaggtcattcttcaagtgtgctgtcgatcagcttcttgttgcaactgaacaagcggctatggagttggctgctgacgaagatgctaatgggctagatccctctaattctgtgttcctcttcgtgggtgaagtgatatctcgtgctagccgtcgtggatctactggtgagtattcatccttcaggatgtagcttgacgtgtgcagtgtgctattagtttatctgctttgacatttctatctactgatgggggcagttctagttggtgcaggaatggttttgcaatgcatttgtgtctggtaggattatagtgtattcaactcaacatttatgtttgcgatggtctgctctagggtgatggagcttatccttttttgtcctcatataatccttaatccttatgcaaactaattcaacacagtggtacacatttggttttctctgatggtccactaatagtcccttcagctgaaattttaaacatttaaggtagcctgtttttgggtttttatccagtgttcacttttggcaatcacagtagacttggggtctgcaatgcttgagatgtcacccaggatagcagtgcctcatgtcatggctgatcatcctagcacactgttctagtcattaacaacttcttgtttgtaatctatgtagccatccttttccctactatttgttgtatttctgataatatatcttgctcttttcaggcattttaggtgctgagctgattcctaggatccgtagtcacttaaagagatgtatggaatctgatcataaaaccataagtcctgacaagatcaagcatgtttcccaattttggtttaatgtggttgaggctattagagaccagcattctgttgaaaggttggcggaagagatgttgcgccaacttgcatcacaacatacaagcgatgaggaggcatactggattctgtggactttgtttaatcagagcttcatgcacaaaactgtttttgaggtgagaatgagatagtacatgtgcgcattttaatactatgcaacacttgacgtgcttgttttttagtttatccacattggttcatctgtgtctggcatgctacatttatctgtgaaggaaaaagtacttctgaggtttatttttttcagttagtggatgttttaggtaaggtgaatgatagtcttcagataccctgtatgtctttgttacttcattcctatgaacgacaaacagggtgccatgtatgtttacttaactttcagcatgggcttatattatgggtgtctattcagcgtataattggcatgcagcgattgatcaaataatcttcaacgtgtcttttcttttcttttctttcatcctttaattctctgtgctttcttcagggcaatgtttgttgacaaatttttgcgttggaaaacattccctctatgttgtctgagatggattcttcactatgctgtctttgaattgccaccaaattcaggcatagaaacacagaagcaaaggacatcgagcttccttggtacactgcaaactttagtcagtgtttggtccaagaaagagtttgtccaggcatactcagtggagcaacaagcttgtatcctttgaggcactcaaaactgtattacattacacactttttatttgcaaattatcatttgacttgttccccttaaacaacactcagacatcactgcagcaattgggttgtgtttggagaagatgtcaaaaagagaattagaaacaactaaagatgtattgaacaatattcttgaaggtgtaagctgtgagtatcccccccccaccccccctgcattagcttatcatattattattatggtaatactgaatgctcttttgctgtaggtaggttagagagtccaattgatttaatccggaagatggccagtgctattgcattgacattttctaaagttgttgatccaaacaatcctctataccttgatgataactgttgtgagaatgttgagtgggactttggggttttatctccgaaggaaatcacagccccttcaaaggatgtagaacttataagcaaactgaaaccatctttgcctgagaacaagaaacatgctggtgagagaagggcaaaggctattaaacatgatacttcagagaacagggcaaaaatcattgagatcaaatcactagattcttgtgaaacgtctggttctgctgtgaatgggcatttcggagaggaagaatgtgatgaggaaataatgaacattgatgcctccagtgattcatccctggagccatatgatctgtcagacgatgactcagatttgcagaagaaattcacccaattaaaagatcttgctgctgcactacgaaaacctgatgatccagacggtgtaagtttctatctagtgctacctgtactttccagagcaaattattgtaaaattctgatcatcctccctttttttttacccaaggttgaaaacgctctgagttctgccgaaaagcttgtgagagcatcacctgatgaactacgccacaactcaggtgatcttgttagagcacttgtgcatgttcgatgttctgacgtggcaatggaaggagaggaagattctgctgaagaaaagagacagaaggcattagttgccttgctggtaacctgcacatttgaaccattagatgttctcaccaagttgctgtactcatcaagcgtggatgtaagtcagcgcattttgattattgatgttatgactgaggccgcacaggagcttgcggaaactaaaattgtaaggagagagctgcggcatggaaacttgatatccgacacctctccctcttggctagttcctagtgatcagggacctgctggtgcaggtccttggagggaagtctcagaatcaggaacacttctgaattggtcacaccggtatgaaagagaagttccatctagatctggtcaagttaaatcaggaaaatctcgtaaatggggtcttggaaaagctaaagatttgcagacagagtggtcaaaaaacagatttcctttatatgctgctgcttttatgctccctgttatgcaaggatatgataaaagatcacatggtgttgacttgctcaatcgggactttgttgtcctaggtaaattgatatacatgcttggtgtctgtatgaagtgcatggcaatgcatccagaagcatcagctgttgccccagctcttcttgatatgatcagatctaggtatgccaagcctaaaacaagcatttccgtgttaaagactttcttagttataaccaagtggtacgattttgacattggattttgtttctgcagggctgtttcgcaacatcccgaagcatacgtcaggaggtctgtgttgtttgcagcttcttgcatactgatagcgctgcatccgtcgtatgttgcatcatctcttatagaaggaaatcaggatgtttctactggtttggaatggatacgcacatgggctcttcatgttgcagaaacagatcctgatacagaatgcacatcagtaagtactctggtctatatctgttatcgatcacttgttcgtgttttgttcgtcgacgtagagagcaattatggtataataggatgacatttgtttcttaaaaccacacacaataataataggtcattttttgacgaacaaaggagtacagttatgctggttttgtatcaaagtttgtctgcatcgcctaatcatttcagtaacctacccttatatgctttagttttctgtaacctactcatttctctcattccttcagtatacaaattcagtgacccagctcttttcagcaatttgtaacgaaaaacaggacatatttttacttataagctggaaaccagtttttacttaaaagagaccaattcagtataagctggaaactcagtaacttttcacactgtcatctaactcctcccattggcatgtttgtcttcaagatggctatgacctgcctgcggcttcattctgagatggcccttcagacatcacgagcactggaatcggcggatcacagcaaggccagcagcagcagcagcaggtcgctaccttctaagcttgataacatcatcataccatttgccaacatgatgtgatcgatgtactagattaagttgtaaataagcatatattatcttgccatgtaatattagaaattccaggtcagctaattctgattaggcttgatattgtcatattacagggttttttaatctgggatttgaaaatgctagaatttttgtcgattcgtgtggagattgtatggaagttgtcctgatccagattaaagagaattgatgaaaattgtacccagattgatgaactgactaatagttgatgatgatgagtaaaagagaattggacgagtcatgcaggggcgaggtatccgtggggaccaccagccacaggatggggccactcctcgagcgttggatcagccgcgagggacgatccgacggaggagattcgtccggtccaggtatttaagcacaactttttgcgcttcgcagcacaaccacttttccgcatctctctctctctcgcgtctcaagagcagcggcaaaggtgagaggtgagatctctctcccacttcatcctcctctcctctgtggtttcatccgccgcctccatccctaaaccctacttcttctccgaaagcgccgtgagattcttctccctactcttcttcgatcttgctccattggtggtggtgtttgtttgcttggagtgtttggtgtcgcggtttctctcgttcttgtcttcgctgaatcgagcagcaccctgcgtcttggttggttcctgtttaccgcggtctggtcctcttttttcgtgttcttcgcttcccgtacccgtgatgttgttgcttgatgcatttgaggcgtggttttctcggagttggatgaggaggtcgacgagcaccgaagcttcatggttggtctccgttcgcctctctcccatcggagcacgttgatcttgacggttcctggcgcgaccaatgcgtgcgcgagaagttagacgccatgaattcgtttctcttctctgctttgtttttttttttggctcctgttttgcagttggtgtgttgcggaggtgtcagtttctgaatttgtataaaccaaatgccctcttcttattctttttgctgttcctgatgcaatctgcccgtcttccttacgtattgatcaagtagaacggcgcctcgttctcttctcgaattttaaggcgtttcggaatccgaaatttgctaagattttacctggccgtgatcatttttttcctcctgttcttggcttccctttcccgtgttgttgttgcttgatgcttttgaagttgggtgtgtgagtttcttggaggaggttgaagagcacggaagcttcatggtgatctcgttcgcctctcctcggaacatgttagtcttgatcttgccttccgtttctctatttggtcttgatcttgccttccgtttctctatttctaccagtgcaagctcgagaaattaaaccacatcaattcgtttctcttttcagtttgttctgttttggtatgctgcggaagtgccagtttctgaatttgtattagctagatgccttcttctgttcatttcgctgctcctgatgcaatatgcaggatgcttcttctctacacgtctctctgttttctgcctcgaaagaactctctgtcctattgtggctttgtttactcgatgctattttttcgttcaatgatttctgcatgtgtcgctccattgaattacttgtaaatcttctgattctttacctatcaaagaaacttccatctcttgaatcttgatttggcttccttctcccttaccgagatattgtgcattttttgtctgtaacctgtttttcacttctctgtgatggcgttcggtgccgtactgtactgttaggttgttcttgctttttttcttctgttcttcattctctgtttgcaattgtttaagttttgattcgccgaagcagtgccatatctaaaggaaatcgatcattcttgtacagtacactttatgcgctcgtttcctcttcttatctcactttgaaatttggtgttatgatatgtgtcagtaaagcttatatcgcgtttgtagaaaaccttgtgtgtattttgttcgcagtaataaaataagatttaggtgtaaaataatgcagcactgcaactgaagattgatacttccatgttatatatctcaaaaatgcatttaagcatttaagggccctgaatgaaagcaccaattacaccctgtgctttgagctagataagtagtgccatatcaagtttgatgattctacttcactttatttcatatgtaacctagctttctggcatttaattgatctgtattattgtttaagtgtctttccccgtttttgttaataatgttattttatatttgtattcatgttaaattttcagcaaagcaagttccgctatgggtaacagccttcctgtagaatcgaagttcacttttgaagaagagaatgacagaattaagtatgttgtgtcgtctatgcaaggatggggtgagaaaatggaagatgctgtgagtaaacttgcagccttttgtatgaaaaaaaaagggacagttctgcaaaatactgtgactgacatatgccctctatattctctagcatgcagctattctaaatcttgatgatgccacgtccacgtctttctttggtgtttatgatggccatggaggtttgctttcattctcattttttttttaatttcaaaccctccaaattgttggcgtaactgttatgtcatgctatgtttgtctgtgtgtatcactttgtttatctctgcgcatgttttgaaaactttgtggtatatgttgaaacatttacctgtcaattttcaaataaatatgatgctacagttatggataatgaacaagttagctaatcagtaatcacattcgtgtggcatgcttgcaaggataacatgaactacataaaaagaaattttaattcatgagagataaaacactgcatgaatatgagttactagtaatataaatggtgatgataatttagaggataattacagattaacaggttagtttttttttaatgatgcctattcaagtgttgttctgctactaatgttcacaacagtgttttgatttataagcttctatgcaatagaagtaatcttgatccatcgtattgagcgagacgccatactgaattgtttttttctatctcaggagctgaagtagcattgtattgcgcaaaacaatttcacattgagctatgcaatcatgaagactatcacaacgatctgattaatgcactggacaatgtgtttttaaggttattttggcctactttacataattttgtttatagctgcacttggaaatgtgggatatcattgttcgtgtgattgctgcagcatggatgagaacctgcaacagtccgatgcttggagagagttagttattcctcatgataatggatgtatgtattttctcaaggctggtgtctgtgctaagcctttcccacaggtagtaatcttttaacccctagcatcctcaaatattcatatcgtgaagaagttactcaaaattgtatttgttggacagtgtgcatattgtatctatgaaaaaggaaatggaagaatgtgtttgatatcgagactgttgttctttcttgtgatgtactttggagttggaggagatatgtttaaccctaatctcgactaattgctcctattaaaaaaggttcaattagttacatatcaattggctggtttactgagttggaggccaacaggttcttaagttctcattgcaccttggttcttatcatactatgctatccaaattgaggtattgtttgcgatatcccttcgatggttatttctttcatacattggtttggttttcagaaatgtttttctatacctgttggctttcttgagctattttttggtagccttttccttctaacaatgttgtgattctgtgttatatacttcagtttggttgttgttttcccaggcgacatatactgggccagcgtatgaagggagcacagcatgtgtggttgtcatcagaggtaaccaaatgattgttggacatgttggtgattctcgttgcgtactctcaagacagggtggcctggtatagtgattgtttccctattgaatttctggttaatacctaatttgcaagctcgttcattgtggtgcctaacatttgtgcttgtttccattttgtcaataggctattgatttatccttcgatcacaaaccatgcacaagaactgagtctgaaagagagagagttcaaaatgcaggagggagatctcttggacttaggtgtgaacaagtaatggggaattatgtagtcaaggaacaatgggtcctcggtgattttgggggaggtgtaacaatctcaagatcaattggtatagtcttgtctggatctgtttttcattgattgcatgtaatagcacaaaaagaagcacattacactgtgattggcgttttacctacttacatttcaggtgactttgctttcaagaagaacaaagatttagatcgtgaaaaacaaatgctggtatgtgatccggacatcctcgctgtaagtgtaactaagtgtaaataggtccgtttggtagaatatgaagttcagttttgccgggttgggatctgatggaaaattgccctttcaatgtcaggatgacataactgatgacatggagtttcttgttattgcaagtcaaggtctctggtaagtggtaactcttcagcaaaaaatacctgtcaataactattggatcatttttatgtcaccagtactcattggcattctcttttttttttttcctcctatttggttcatatatagtttcactcatagttccatactaattgcattgactactgtatattttccccctgcaggtcttgcgtggacagtgcggacgtggtttcttacatacatgaccgtttatcggtggtgagtcttttctttccctcagtttgtcttcttggcaggacaagatatcttagtggtgttaatcatgctatctgttctaggaaatgacttcaatcaagcaatgtaaatatcctgattttctcttttcttttaaaaaaaaactgtgtaagccctaaacctcacaaaaccatttgttagtttagcactgaatatgcatgcctggctgacaaactgccatctgctttgacttcgattctttcgctgttaaaactgctgttaccaataatgctgtgaccaattaatattgctatgcaggagggtgcagagctgcgtgtcatctgtgaggaggttgttgagttcggcttggcatcgggcgagaacactaccgtcatcctggttcagttcaagcccggcgccttccagtaccagctggtggatcccgctggatttggcactgccgtctctaacattgccagcaccagtgctgcgccggctggtgccagcgacacaagcgacgagggcgtcatggccgactccagcgccacggctgacaccagcggcagtgccagggctgagagcggcgagctcgtccccactcccagcgccaacaacaccgtcacggatgaggtcgatcccactggcactgtcgcagccgacgacaaggtcgatcccaactccagcgccaatgccgacgctgacgacggcgctcccaaaccttctctcggcgcagtcatcgagtccgacgaggtcgccctcgatgccactgcaacgggccatcaggtggccgtgcgtcagcaggaggaattcgacccaaagaagtgttggatctgcggaaaaggctacaagaagattcttcttgaaccttcttcggccagggcgagaaacccacttctggctcacgctaagacgtgtgagtcggaagacaagaaggcgaagaagaagataaccaagtatatgatgaaagccaacgtcaccaaccagtatcattgatactgtacgttaactacttgcacctgtacgttaactactttgcttttggtgaagttttcctcattcttctagctctatgtgatacgttttggttttaaatcgattcatgcattggataatggatgttggtgaaatgaagggagtaatcagtcatatggttggtttaatgggaaagtctatttgtggattaagtagatccatgccaccatttagcagtgatggctattcggtcaagtcttccgataacaccaccatatcttcagcaactcacagtcgaatgaattatttttctaacttattttgtataaaacgaaatcctaattgcaaaaattttagatctttctgtatcctcaaggacttaagtgtgccaaaagatctcggtgggtctctccttgatatcccaaaaacttcatcccaaagttccattacaaatcccaaggttcgaattttgaaattcaaaacttgcctaaatccttgtgaatcacccaaaccctaaatccttccctcccaaaaaaattcaaattttccgagaaaatcatccaagcctataattttattattcccttaaatcctcataaattactgtgcacaaatatcaatatcaattcatgcaaaaattgcattggctgagtgcataatattaatagcgccatgtttcaaccaacaaagaaatattatatcaaatttcatttgcgtcgattttgattttggcctgaaagaagagtaacttcattgtgagatgattcactatatgaaaatataagagctaacaacgtcaatttgtgtcaattagtactaaaatcaacccaaatactataatctactctctccgatccccaaaactctcttgcgtcttgctgcccaaactcgtagaaccaaatatttatgtccgaggtgatctccttggtgttagacgaactggatgactttggtacaaatgctgtttcgccatcacgtgtaacaatgtcgacatggatagtctcaggccagtcatacagcctcgggaggaacaccttgttttgcatcaatctaagcttagtcttcctcaacattgtcgtgtatgtcccggtgaacaacgcatgtccttccaatgaccgcatcttctcccactccatcgtctcttcgttgagcttgacgacatggataggcgcaccactgtagccgacgaggacagccatgagcgcgccttggtcggactcaaacaggtggctatcaacttggtgtttgattccaaagcccttaggtttatcgggaactgtaaaattattgtcgtggttgcatggatcatacaccgccatcttcccgtcttcaccaagaacatacaacaaaccaccatggagcaccgggttgctgatcggcgccgccagaagttgcggtccttccacgtcaaagtccgttaattcccagggcccccactcgccgtcgtcttgttgggtcgcacgggcgagctgtagcgcgtacgtcgtgttgacgcaatacatcctccgcgcgtgctcatcgtagacaataaactcgaatgaatagaaaggcatctctggcagctcatacatggtgccggctacgagatcggcttggaggatcaatctaggtagacacagcgtgaggtgttgtccactggagcagcagatcctagccgcaattttgggcaccttgaggagcgtgtcggcgatctcgaaacacctgtggtagtaggggctgtagtacctgacgttcgtgacgccgatgtcggcggcgctcaggaggagaggcgtgatccacgccgggtagaagggcgacacggcggagcgccagtgccggcacgtcaatgcgaagctcgggtgggtcgaccacccgagccgatccaggacgagcacgagcatgtccaacgggagagacgaccagtcccgtagtccctgcgccgccgtcgcagtggcctccatctatctgcttggcgaatctcgagggttcgtgcaccgcaatggcctgcttggcgcgctgcgttttgtgctgctacggagctctgctttcttgacgtgtttcctccggactcatatataggtcggcttccgcttctgcttgtagtttgtatacccggcacggttggtttttgttggttgctatccaatctccatagatgcatatgtggtgatccctctttatccccggcccagattactgtttccttttactgatttaccggcccaaagtactagtactataatttgtttgaattttgatgtcgtgtaggaattcatgtcctaattggtactagtaatcgtaggtcgtaggcgtgcagatttcttcgcttctctttcctatatgccagtaattgcactgctcaaagcctctcctcgtttataaagcaccgccaaattcgttcgttttcaattgaccggccgtatcctacctgtgggacagtcggccatcaaaatcatggaggaggcaggcgatgcatctgcagcagtactggatcccaagcttgctcctctgcttctgttcggccacggcgacgccacgtccctgtacagcgtgccggcgagagcactgctgccaaggagggtgggcgacggcggcgtcgacgacatgatgagaggccaccggtggtggaccacggcgcagggctggctgctcatggcgcgccgcggctcgccgtgcactttcctgtgggaccctttcaccggccgccgtgtcgggctgccccccgaccacgacggcaccgtcctcgccgccgaaggcagcagccatcgccggaggtgcctcctctcgtgctgcggtcccatggacccggccagctgcgtcgtgctcgtcatcgaccacgccgacacggtgctctggtattgccgccccggcgacaaccactgggtgaagaggcatcagcaccagtacctccagcctgggccgcctcaccacgagcaccgcggcatcgtcatcctggcgttacgccagctcacggcgatggacggcgagttctacaccgatctcatcgaccatgtcgccgtcctcgagttctcactggagccggcgttcaccgtgaccgccgtagacgacgacgacaggaggccggcggtgtacatgaaacgtaccagcatctttgtggaatcgaacggggagctgcactccattctcttctctcacccgattggatgtgatcggattgtcgctggtgttggcgtttacaggctgagcatggcgacgacgcaggagcaaagatcagcgtgggtgaaggtggattcgctaggtggcagagtgttcttcgttcagataggctgttttggagcgtcacttgatgcacggacaacaggcttgagagggaactgtatctactactcggggttcaatgggaaagcgctgtgtgtctacgacatggaacgaggaactacggctgtaatcaaccccggagaacatcttccatatcaccagtcgcctaaaatattgatgccaaccagatgagcatttcttactccattcgttcgaaagtaatatggtaatctaaaattggatggcatgcattaaagatgtacaccaatgtagctatatctcgtctattaattttataagatttaatttcataagatataatatttttctatgaaacggggtaaaaatgacgggagatttgcaataatgacactgcaaacattgacctttgctataatgatactggacacatatttcatagacacatatggacccatttgtcatccactcggagtgtcaagacagcgaagccctaatgtttgttgtcccaatattgcaattttctctaaaaggaccctgggtgttgcagcgagagatcttgctatgaatgatagctcaacttggtaaattatctttgagaaaatagtttacaaaatattaaaatccagaagaacaaaataagagtcaggttcaactcaaagccaatttttcgagtacagtatatatatgaaaatgggtactcctagggagtacatactcccgctcctattgaccgtccatcgaagcaagccccgatgaagcccgttaccggatccacacgcggtggacaaatttccgtccgcggtaatcggaaaatcgaaacaatgttgagctcgcatataaatccctctcgacagccctgatcgataaatcaggttgtcaacgggcgattcagagcgaacaacggcgattttgtgacatcaatccatggcacaggtgatatgagattctctttccgtcttctttgcttttctcgtggagcttcctcttgttatatcagtttttattgctcatgcacgagaaacgatctttaatacctgttcgagactagtaatcgagactaaactttttgatgtttaattagtaccaattgaaacaacatgtagtaaagatgcatactaagtaaaaaaaaataatagtatgtgagatttgaattcaacatctcgtagcataactgtacaatactagcagatatattcatagttttattttatttcttcttaacccttgtttagttctaaactttttcttcaaactttcaactttttcatcacatcaaaacgttcctacacacacaaacttacaacttttccgtcatatcgtttcaatttcaaccaaacttccaattttgacgtgaactaaacacacccttaacttaactatacctggtaggcattcttttcatttccctgtcctctgctcagaaattgtactcgagcagtacgtgttgagttccgcacacagaatgtaatacgtgcagaatagaacaatactagtactaccattatgtagatgtggatgtttctgttgtaaccatgataaattcatcatggtttcttcgggaagcatgatgtcggtgacatgggaccgggagtatcatgactagaggtttgggcaggagcaatcacccacgtggcctgaccccctcgggggggtcgggcccgaaggtgatgaggccgcccctctctttgtctccccgagggatcggaccgctcccgtttcggccccgagggccgaggcgccccgaccccttgtgggttttgcgccgcgtgtataggttaggtgagcacggcggggctcacctaaccgcatttattgcggtttgaacgagcgcgtcacgccgcatgtaacgcagtgcagcgcgctcgtttatccggtctgtgaccggtcacagaccggtcagatcgtgggttaggtggcaacaggcggtctgacacacgcctcgccccatcccgtcaggataagagcctccaggcacttgtccctagccggagccagcgtgctagctcctggagatgacacgttggtcccggtcagatatatgctaggcttcatcccaaccgttacaagcaagacattgtatgaagaagggtgaacatgcagattgataaactgacgcgtggtggacaagaatgaccgatttgtgaccggtctgacactggtcatgtcgtcggcagacagccatgttcccacgtcgcacctgcttccggcgaaagtggaggtaggtatgggccgtcccatcagaaggtcattcggacggcaaccattacaaatctccgcccatttatgaaggaaaggcgagccaagttttagtgaaaagaggatgggtccccaccaaaaagagaaataggtagaagtggtgcatgtggtatccccttgagatataaaaggaggaccttgcccacttagggaggggatccggaccagaggaccaggggaggagagattggagactcccggaggatccaggagaagatcccacgagaggcaaaaaggaggaaaggggtttctagagtttgagctctctggttctccagctctttgtagcttcttcgtacacagatctaccagaacacaggagtagggtattacgcttctcagcggcccgaacctgtatacattgcccgtgtcttgtgtgtttccactttcgcgaacattccacagactaggagcttagaacctcacccagggccctcggccgaaccggcaaagggggacctgcgcggtctcccggtgaggagccccacgctccgtcatctgacgcgccaggtagggggttctgcgtgtgtttttctaagctctcatactctttcgtgtgcgccaagcttttcctgttcagcccaatggctaaacaagcaaaagcgcacaagctctctccgagtgttagcggtgacgacggggagccgaacccacgccgtcgagctcgtactccaccgccccctccacgccaaagtcctaggcgggaggaggcgctcgagagggtcgaaggatccgcgacttcgacatccacgggtgatggagaagggcgccgagatggggagcgtcgcctcctcgtctacggcgacggtagcacgccccagggcgcgctccaagctgcgggcgcgctcctacgtcacccgcccgtcgtccctgacccggagtctccagcccaacgttggctggatgacgtagccaacttggtcatgacggcacggcagcacctaggtgttggtgggcggtcctccgccaccaagacctctggcgctgctaccaccggctccgtgtcgtcaaggcggagggcgcggcgagcggcggctgttgctcgccgttcggctgccactccctcgtcagcacctctgacccgggaagatcagcgtggggggccagatgcccgcatcggtatcgagcgccggcgtaatggtcgacgtgctacccacgcaacggagggtgcctcctcgtccggagtgtcacctcaacacggacgcggggatcagccctccgtgcccccggttggtggtgtcggctgtagagcctttgtagcgagccttcggaacgtccgttggcccccaaggttccggcccaccatcgccgaaaaatatgacgggagcgtcaaccccgccgagtttctccaggtctacacgaccgggatcgaggccgccgggggtgatgacagggtcatggcgaatttctttcccatggccctgaagggacaggcgcggggttggctaatgaacttgccacccgcgtcggtccactcttgggaggatttgtgccaacagtttaccatgaactttcaaggcacatatccgcgcccaggtgaagaagcggacttacacgcagtacagcgaagggatgatgagtcacttcgctcatacattcagcggttctgtcaagtccgcaacaccataccatgcatccctgcacacgcggtgatctacgcgttcaggggggtgtgcggcacaaccgcatgctcgaaaagatcgcctccaaggagccccagactaccgcggagctttttcagctcgcggaccgagtggctcgtaaggaggaggcctggacctggaacccctccggttccggtgtggcaacttcggccgcccccgggtccgctgctcagacagggcgacgtgacaggaggaggaagaagaggtcggcccattccgacgacgagggtcatgtcctcgctgtcgagggcgcttcgcgggccacccgaaaggggaggcctgcgagcgacaaaaagaaggaggccggcgctcccagcagggagcgcccaaccggcaagtggtgcatcgtccacaacacctccctccacgacctcgcggactgccgcgcagtcaaaagtttggctgagcggacgagaaagtgggaggaggagaggaggcaggagcgccgagagggtaagtccccggcggtaccctccggcaatcggcgaagtgaggccaagcagaaggcccccgtcgaggacatcgatggcggcgatgatgacctaggctttcaggagcctggggccaccattgccactgtcgatgggggagcgtgtgctcacgtttctcgccggagccttaaggccatgaagcgagagcttctggccgcggcccccactcatgaggcgacgcgtcgggcgcggtggtcggaggttgccctcaccttcgaccagaccgaccacccaccgtgtgttgcccggggaggacagatcgcgatggtggtttcccccaccgtttgcaacgtgaagttggggcgtgtcctcatagacggggggggggggggggggcagccctcaacatcctttcccccgcggcctttgacgccatcaaggccccggggatggtgctctggccgtcccagccgattatcggtgtgacgccggggcacacatggccgttaggtcatatcgacctaccggtcaccttcggtggatccgtcaacttccgcacggagcgggtaaacttcgatgtggcggacctaagtctgccctacaacgcggtcctagggaggcccgcgttggtgaagttcatggcggcggtccattacgcttaccttcagatgaagatgccgggccccggtggccccatctctgtccatggcgacctcaaagtcgcgcttgcttgtatggagcagcgcgcggatcacctcgccgctgcgtccaagcccgagggtggcgacgagaggcttggcacctccgttcccgccgccccgaggcagcggatgatcacatgcgacgaggtcccggtcaaggaggttgccctgggtgacggcccgtccaagactacacgaatcggtggtcttctggatggcaaataggaagacgcgctcgtctccttcctgcgggcaaacgctgacgtcttcgcatggagaccggcggatatgcccggggtccccagggaggtgattgagcaccgtctcgccgtacggccgggcgcaaggccgatccggcagaaagtgcggcggcaggccccggaacgtcaagccttcatccgcgaggaggtggcgcgacttctggaggccggattcatccgcgaggtcatccatccggagtggctggcaaacccggtggtcgttcccaaggcgaatggcaaacttcggatgtgcatcgactacaccgaccttaacaaggcatgtcctaaggacccttaccccctgcctcgcatagatcagattgtcgactccacagcggggtgcgaccttttgtgttttctagatgcatactctggttaccatcagattcgcatggctagggaggatgaggaaaaaactacattcattacccccataggaacttattgttatacgacaatgcccttcgggttaaagaatgcaggtcctacttttcaacgtactactcgaatttctttgggtagccaaataggacgtaatgttgaggcttatgtcgatgacttggttgtgaagacgcgcgaccaagaaactttactttcagatctggcggaaactttcgagagtctccgctccgcccgcataaagctgaaccccgataagtgcgtgtacggtgtacctgcgggcaagcttctcgggttcttggtctctgcccgaggcatcgaggccaaccccgagaagatacgagctatagagcggatgcgcccccagcaagcttagggatgtgcaatgcgtcaccggttgcatggccgccctaagtcggttcatatcgaggctgggagagaaggcgctacccttatttaagctcctcaaacgctccgggccgttcacttggacggaggaagctgaacgtgccctcactcagttgaaggcgtatctcagctctcccccagttttgatcgccccggagccagatgaacccttgctactctacttagcggcgaccccgcaagtagttagtgcggcgttggttgtggagcgcgatgaggacaatcctcattccgcgcatccccaccctgtgctggcttggcccgggagagagcagggaggagaggcccccgagccgaacggtggcccaaggcccccgacgaccggagctggccctctgcccgcttgtcagacggtgccaggtgcccccgacccccaggatggcccgggggccactgcgggaaggccgcacctatcgccctctgacctcgaggttaaccctgtgccgactcgacccgggagagagcagggagaagaggcccccgagccgaacggtggcctaaggcccccgacgaccagagttggccctttgcccgcttgtccgacgatgccaggagcccccgacccccaggacggccccgaggccactgtgggaaggccgcgcctgtcgtcctccgaccccgaggtcgtcggcacagaagacgagtgcgccccgcgaggccgcttggacgaagagcgccccagggatgcggcccctggcgaagaggatcggccccaccgaaaggtgcagcggcccgtctactttgttagtgaggccctccgggacgccaagacccgataccctcaggcccagaagatgctttatgctattctgatggcttcgaggaaactgcgccattatttccaggcgcatcgggtcacggtggttacgtcttaccccctcggccaaatcttgcataatcgagagggtataggacgggtggtgaaatgggcaattgaactttctgagttcgatttgcactttgaaccacgtcacgctatcaagagccaagctctcgccgattttgtggcagagtggaccccggctcccgaacccgtctcactccccgaggccagctcgggcccctcgcagctgcctcacaccgcccgctgggtgatgcagttcgacggctccctgtctcttcagggcgccggtgcgggggtcacgttgacctcgccgagcggagaaatcctcagatacctggttcgcctcgattttcgggcgaccaataatatggcagagtacgagggactccttgcgggacttagggtggcagctggactggggatccgccgcctcctggtgttaaccaggtctgtatggagtaccggtgctctgacccgcagatggatgcttacgtacgccaagtacggcgtatggagcgccatttcgacgggatagagcttcggcacgtgcccagacgggataacacgattgccgacgaactctcacggctcgcttcctcgcgagcccagaccccaccgagcgcctttgaagaaaggcttgcccagccgtcggcgcgacccgaccccttaggggagacggacgcgcctgaccggcccccgaggcccgtcggagtccaggcctcgggacccgaggggagcgctcccagctcccttagattgattgcttggatcgctgagatccaagcatacctcacagataagactctacccgaggaccgcgaagggagtgaacgcgtccagcgcatctccaaacgctacgtgctggtagaagggaccctctatcggcgcgcggctaacggaatcctcctgaagtgcattcctcgggaacaaggcgtcgagcttcttgccgatatccatgaaggcgaatgcggagcccactccgcctcgcgcaccttggttggcaaagcctttcgtcaaggtttctattggccgacagctctcaatgatgcggtcgacctggtccggcgatgcagagcgtgtcaattccacgccaagcaaatccatcaaccggcccaggccctgcagatcataccactttcatggccatttgctgtctgggggctcgatatcctgggaccgttgtcgcgtcccaaaacgactctaaaattcatcctcaaaattgtgccgagaataattaaaattcatgtgaaagcctccaacaattaaaatgtgcaaagataaaagtcaaatgaggcttggaggatttttgtatatttcctaaaagcctaaaatgtgtaaataaattttagtggaattttcagagcacaaataataattgagaagaaataaacaaagttgaaaaggtttataaaaagaaaaccctaaaagaagtccttttcctccccttttcccttcttgggccggctcggcccaactcccccccctctctcctctccccgcggcccatcggctcctccccgcgcgcgcgccgctgacgggtgggcccgcccgccaccctcgctgacgggtgggtcccgcctgtcatcttcctcctcgcgccgcgccgccgcccgcccgtgccctagcgccgccgccgccgcggattccgccgcatcccgccgtccccgcgcgcattaaagagggggaaatcactccccgtgattccctctcccgtttccccctcttttccctctctctctccctcggattcgtccgatttgaatcccgcaatcgtcgccggtgtcttcaatggagccgagatctccgcggccgtttcctccctctccggccgcgctctccccctctcggcgctatatatttgctccccgtgcctctctcctccgtttccgccgctcgccgctcgctctcgccgtcggattcgtgctagcgccgtcctcctctctctccgccgtcgccgccaaccttcggttcgccgccgtcgtcactccggacttcctcccgactcggcgccacctccatcggcttcgccgcgtcgtcgtcgaccccgtccgctcctccgtttcgcccgccgactgccggagcaccgtcgccctcgtcatcccgaaccgcgccgccgcctctcgccgcttcggtcgtcgtttccgccgccctcgtcgtcccggggtgagccgaggaccgccgttcgctttccctcttctctccgctctctcgggcgccgctccgccgcgccggtggtcgccggcggtgaccatcggggagcgggtgcgccgcctcccgtcggccgtgccggcgaggccgccttcggccgcctcccgcggctgccaggtggggcccggccgtcagccgcccgcgcccgcgggtgcggctgacttgtgggacccacggcgccgaccgccgccagccgcgtgctcccggtccaccgtggaccgagaggctgacgcgtgggccccactcccgtggacccggtccgcgcgccctctctctcggctgacgcaataattcgatttttaaattaaaatttaaatgaagaaattcgcaaatatccatttaaagagcatataaacttcaaatggccataacttggccatttgaactcggaattggaccgttcaagtctctaatttttccttaagaagtgaagaacccatttttgtgctttgtttctgctgttatgtggaatttattagtgtttgtgtcgcgaccgggaaaattgccttttcccgaacgctagtgtattaatccccgtcccaggaaaagccggggtacaccacacaaacatggtataaaagacacatctttattatatcgataatatttacattattacaaaggcacttaaggcctgacaatcaaaaataaacagcagcggactagcgggcctacggctcaatcttcacaggcgctcaactggggtataagccaggactccacctaagacatcttctccaaagcttctcttactgaagaggggaaagattgagcaagaataagtacaaccacagtactcagcaagccacaccggagatgcataattaatgcaagggagtacaaggggataataatataggggttaagttttgcagtaaacagcatttaaaagtcacttagttgccccaaagccattttataagacaatcctagagctacacagtattattaaacaaggccgtgaaccctcacgaacctgccttaacccaaggcctacgatgattcagaccgaactggcaacccgaccctgggtcccagctcgtcccaagccaacccaggccaaccattccacattttagttgttgagcaaattttaagaattgaaacactgacttgggtacattgctcggcttgcccataaccgagggcgcggctattcgaatagattatactctgatcagaggtgtacatctttacccacaagacacatcttcctcacgtgtaaccacgtgccacataccaccacggtatacagacggaagacgtgacatagtttccaacccatcctagccatagacaagagtaccgacccaatcccgcctacggccggaacacccgggacaggcaggcaggactgagcccctagcagcagggcaccaaccctctgccatatgacatctcgactaccgggccgcagctcgtgtagccttcatttgccctggagaatgtccatcgacccccgacttcatccatctccaatccgtgtacttttgtttatgactagactgagccacaaactaagccttacccactagacatgtggaagtacggtagtgctttgcaacagaggcccgaagaccggtccttatatggccgaggtgctaccatcaaaaccatgcaccccgagcccagcctaaaaccattttggggacttttgaatagagggggaggtgtgattccaattccacaataaaccaacaattccagagtgtccaggtgatatgaatatttcccaaagtctagagttggaaaacctcctaatgttacttaattaaattgcgaagcatctacctagaattaaactagtggtgtcatgagtagagagtccactagttgaggttttgtttgcctagggtgaacaaggtaataataataacaataacaataataatatggtcataacaaaggtaaataggcatggctaaataaaacagtgataacgcgggaatttaaataaagcgataatgcaataatttaaatcaacataattttacaaactggattcaatatgttcaaagatgatgtgacttgccttgctcgctttcccaaacaccggcttcaacttccacgaagagcggatcttccgaagctgcagcgtctacacgaccaacggaaaagaaaaggcttttactctaataaactccacataacagcagaaacaaagcacaaaaatgggttcttgacttcttaaggaaaaattagagacttgaacggtccaattccgagttcaaatggccaagatatggccatttgaagtttatatgctctttaaatggatatttacgaatttcttcatttaaattttaattaaaaacgcatttattgcgtcagccgggggagaggagcgcgcggaccgggtccacgagagtggggcccacacggcagcctctcggtccacggtggaccgggagcacgcggctggcggcggccggcgccgtgggtcccacgcgtcagccgcacccgcgggcgcgggcggctgacggccgggccccacttggcagccgcggggcgcgcccgaaggcggcctcgccggcacggccgacgggaggcggcgcgcccgcgccccgatggtcaccgccggcgaccaccggcgcggcggagcggcgcccgagagagcggagaggagagggaagcgaaagggacggtccacggctcaccccgagacacgaggacggcggagacgacgaacggagcggaggaacgcggcggcgcggttcgggatgacgagggcgacggagctccggcggtcggcgggcgaagcgaaggggcggacggggtcggcgacaacgcggcgaagccgatggaggtgacgccgagacgggaggaagtccggagcgacgacggcggcgaaccggaggtcggcggcgacggcggagagagaggtggacgtcgcgagcacgaatccgatggcgagagcaagcggcgaacggcggaaacggaggagggaggcacggggagcaaatatatagcgccgagagggggagagcgcggccggagagggaggaaacggccgcggagatctcggctccattgaagacgccggcgacgattgcgggattcaaatcggacgaatccgagggagagagagagggaaaagagggggaaacgggagagggaatcgcggggaatgattcccccctcattatggcgcgcggggacggcgggatgcggcggaatccgcggcggcggcggcgctagggcacgggcgagcggcggacgcggcgcgaggagggagatgacaggtgggtcccacccgtcagcgagagtggcgggcgggcccgcctgtcagcggcgcgcgcgcgcgggggagccgatgggccggaggggaagagagagagagggaggggctgggccgagccggcccaagaaggaagggggggggaaaaaagacttttagggatttttctttttataaaccttttcaactttgtttatttcttttcaattattatttgtgctctgaaaattccactaaaatttgagggctccttttagaccaaggagaatttaacaaaaattctccgggccacatttgaatttttcttgtacgtattttagggtttgccaatttcttttcgaattttaattaattctattattcctttttgaaaatgatttttattttgggatgaatttatcaggacgtgacagtttgagccttttcttttccgttggtcgtgtagacgctgtagcttcggaagatccgctcttcgtggaagttgaagacggtgtttgggaaagcgagcaaggcaagacacatcatcttgatcatattgaatcccagtttataaacttatgttgatttaaattattgcattatcgctttatttaaattcccgcgttatcactgttttatttagccatgcctatttacctttgttatgaccttattattattgctattgttattattaccttgttcaccctagattaaacaaaaccccaactagtggacactctactcgtggtatcactagtatgattttaggtagatgcttcgcaatttaattaggtaacattaggtggttttacaactttagactttgggaatattcatatcacctgggcactttggaattgttggtttattgtggaattggattcacaccgctccctctattcaaaagcccccaaaatggttttaggctgggctcggggtgcatggttttgatagtagcacctcggccatataaggaccggtcttcgggcctctgttgcaaagcactaccgtacttccacatgtctagtgggtaaggcttagtttgtggctcagtctagttataaacaaaagtacacggattggagatggatgaagtcgggggtcgatggacattctccagggcaaatgaaggctacacgagctgcggcccggtagtcgagatgtcatggcagagggttggtgccctgctgctaggggctcagtcctgcctgcctgtcccggaggttccggccgtaggcgggattgggtcggtactcttgtctatggctaggatgggttggaaactatgtcacgtcttccgtctgtataccgtggtggtatgtggcacgtggttacacgtgagaaagacgtgtcttgtgggtaaagatgtacacctctgatcagagtttaatctattcgaatagccgcgccctcggttatgggcaagccgagcaatgtacccaagttagtgttttaattcttaaaacccgcttaacaactaaaatgtggaatggttggcctgggttggcttgggacgagctgggacccagggtcgggttgccagttcggtctgaatcatcgtaggccttgggttaaggcaggttcgtgtgggttcacggccttgattaataatattgtttagtgctaggatcgcgtttacaaaatagccttgagcaactaaatgtctttaaatgctgtttactgcaaccctaaccctttatattataattcccttgtactcccttgcatttattctgcatttgtgggtgtgtcttgttgagtacggtggatgtactcagtcttgctcaatttttcccaagtccagaagaggagttccttgaagatgaaggctttggtgtctagctcgtgcctgctgtcaagcgcctgtggtcgtcgccctagtcttccgctgtttttcgtttgtctttgtgtgctgggccttcgctgcccgtgtaataattctatttacgcttccgcttgttaaactctgaattgtatcagcttttggtgtaccttgcctcctgggacaaggattaatgcacgcacgtcaggaacgcccgttgggttatttccggtcgtgacaagttggtatcagagccacccttgaccctaggacgagccgtagatcccaagccttagctatattttcaaaaataaaaatctttggttatttgtgaaaattgtctagtctctctctgccttgctgcttcatttatcgccaaaatctgatcttttaaatgttgttttctttttgtttttgtttgtagatggccggcagcgtcacccgtcgtggtttgcacatgactggcttcgtcttggagctgcggggcatgtgcgtggtcttggggtatccacatggagtggattaccaggccaggccgctcccggagcaggagggtgaggatgcagagccccacgctggttgggaggtcactgcagtgatcctctctggctctcccgagcggacttcgctggcagtcaccgcgggtggagattccttccccgccgcttgccagaacgccgccctcctcgccatcggcacccttcaccagcgctacccggacgagttgcagcactcgccctaccgctaccaccctcgtcgcggaggagcccgcgacttcgccaccttccgggatgctagctcggaggatgacgctaccatcgtgcacctggcacgcatggtggaggcgtacgacgcggctcgtatcgacttccatcagatggtgcgccgcggtatggtcgagaacaacatgaagatcctggagctgcggcaggagaacctgcagctcaagaaggacctcgacgcggtggaggcgcagctgcatcagctcaagatcgcccagggagaggtctgccgccccaagcgtcgccgcgtctgccgcagccagaagatcaccgcccgcaagagcacctccaggcctgagcttgttcgtcagtccctggcgtggacctgcttcgtcgagacccctcgtgccgagcccgcgcccgtggttccccaggagggggaagcctccggcgttggtagcacggaggatgcgctgttgctcaccttccgccctggcccgtcgcagcagtagacgagcagttagtaggcttgcgcgtgtgttcttcctcgtttgtcttcttgttgagtcgtgtggggcatggttatgccggtgtgtggcataactgtgtcggagcctgtcttattttatttgcctaagcaacttgaactttaatgaaccaatttaatagcagtaataaatttaagaattatggtagtcgtgggtggttagttttaattgttagcttctctctctctgtttgctggttctgtgtggggttttcagatggtgacgaccaggagaaatgctgttaccggtgatggcaatcaacctgaaggcagcaaccacaaccaccagggcaacccacctccacctcctcctccgcctccgccaccaccaccagacaccaacgccattctcacccaaatcctcgcccagcaagccaacatgatgactactttcctccaccacctccaaaatccgccacaacagaatgctccacctccacctccccaacactctaaactcgccgagttcctccgcatccgcccacctaccttctctagctccaacaaccccgtggatgcgttggattggttgcatgccgtggggaagaagctggacactgtgcagtgcagtgatgaagagaaagtcatcttcgccgcccaccagctgcagggacccgcatctctatggtgggaccacttccaagctacgcagccagagggacagcctattacatgggctcgcttcaccgccgctttccggagaacccatgtgctcgccggagtcgtggccctcaagaaaagggaattccgagagttgaagcaaggcaaccgctccgtgatggagtatttgcatgagttcaacaacctggcccgttacgctccggaggatgtgcgggaagatgaggagaagcaagagaagttcctggcaggaatggaccccgagctgtccgtccgtctagtctctggggactatccggatttccaacgtctggtggacaagagcatccgcttggaagccaagcacaaggaactggagtcgcacaagcgccgcttggcgaatttccgcaatcaacagggtgctaaccaaagggtccgctacaccaatccctatccagggggatcctcctcgcagcagcaacaacagcagcagcaacctcgctccgcgcctcgacctcaattcgtggtgcgcgtcccacagccgcagcagcagcagaatcaacaagggactcgtgcgccccgtcctcctacgccagccgtgcagcctggtcaaggccacagggacgctcaaggtcagcagcgtctgtgcttcaactgctttgagcccgggcactttgcggataaatgcccgaagccaaggcgtcagcaaggccaagcgcctccccgctccaacaacggtggcaaggacgtcattcggggtcgtgtgaatcacgtgacggccgaggacgtgctgacaactccagacgtcatcgttggtacgttcctcgttcattccatccctgctaccattttgttcgactctggagcttcccactcgtttatatctgtgccattcgtggggagaaatcagttgggggtagaaaggcttaggaaccctctgctcatcaccacccctggaggggttatgacagcaaagtattatagccctgccgtccctatagaaattcaggggattccttttccctcggatctgattctgctagacaccaagaagttggatgtgatccttgggatgaattggttggctcaattccaaggagtagtggtttgcgcgagacgcactgtcactctgtaccgagggccggaacaaccggttgttttctttgcacccccagcctctgtcagaagttcagaacttcatcagataggactgtcagaaatccccatagtcagggagttcggagacgtgtttccggaagaactacctggtatgccgcccaagcgagagattgagttccggatagatcttgctccaggaaccactcctctgtacaagcgaccctatcgtatggcagcgaatgaactggccgaagtcaagaaacagttggaagagttgaaagaaaaggggtatatacgtccgagtacttccccatggggtgctcctgtgatttttgtagagaagaaagacaagacgaagaggatgtgcgtcgactacagagctctcaatgaagtcaccatcaaaaacaagtaccctcttccccggatcgatgacctgttcgatcaacttaaaggtgccactgtattctccaagattgatcttcgttccggatatcaccaattacgtatccgtgaggaagatattccgaagactgcattcaccacgcgatacgggctgtatgaattcacggtgatgtcgttcggcttgaccaatgctcctgccttcttcatgaacttaatgaacaaagtgttcatggaatacttggataagtttgttgtggttttcattgatgacattctgatatactcacaatcagaagaagaccatcagcaccatctccgtctggtgttgggaaagttgcgggaacatcaattgtatgccaagcttagcaagtgtgagttctggttgtccgaagtcaaattcttagggcacgtgatatctgctaaaggagttgctgtggatcccgaaacagtgaccgccgtcaccgattggaagcaacccaagacagtcactcaaattcgcagtttcttaggtttggcaggatactaccggaggttcatcgagaacttctccaaaatcgctcgacccatgacacagttgttgaagaaagaagagaaatttgtgtggagcccgcaatgcgagaaggcgtttcaaactctcaaggaaaagctggtttcctcgccggtgttaatcttgccggatactcgcaaggacttcatggtgtattgtgacgcttcgcgccaaggattggggtgcgtgctcatgcaggacggtcatgtggtagcctatgcctctcgccagcttcggcctcatgaaggcaattaccctacccatgatttggagttagccgctgtggttcatgctctaaaaatctggcggcactatctcattgggaatcgctgtgaaatatataccgatcataagagcttgaaatacatcttcacccagtcggatctgaatcttcggcaaaggagatggttagaactcatcaaggattatgatgtgggaattcactatcatcctggtaaggccaacgtggttgccgacgctctaagtcgaaagagtcattgcaacactcttaacgtccgtggcattccacccgaacttagtcaacaaatggaagccctgaacctaagcatagttggtcgtggattcttggctgcgttggaagccaagcctaccttgctcgatcaaatccgtgaggctcagaagaatgatccggacatgcatggactcctcaagaatatgaaacagggtaaagccgctggtttcacagaggatgaacacggaaccctatggaacggaaatcgggtatgcgttccagatagcagagaacttaaacagctgatacttcaggaagctcacgaaagtccttattcaatccaccctggcagtaccaagatgtacttagacttgaaggagaaatactggtgggttagcatgaagcgggaaattgcagagttcgtggctctgtgtgatgtgtgccagcgtgtcaaggcagagcaccagcgaccggccggactcctccaacctctccaagtgccagaatggaaatgggatgaaattgggatggatttcatcaccggacttccaaaaacccaaggcggatatgattctatatgggtagttgtggatcggttaaccaaggtggctcgattcattcctgtgaagaccacctatggagggaacaaactagcggagctctacttcgctaggatcgtgagtctccatggtattcccaagaaaatcgtatctgataggggaagccaattcacctctcacttttggaagaagctccaagaagagcttggtacccgattaaatttcagcaccgcgtaccacccgcagacagatggatagaccgagcgtctaaatcagatcctagaagatatgcttcgcgcatgtgtcctagatttcgggaagacctgggataagagtctcccctatgccgagttctcctacaataacagttatcaagccagcatacaaatggcaccttatgaagcgttgtacgggcgcaaatgccggacaccgctattgtgggaccaagttggagaaagccaagtgttcgggactgatatcctgagagaagctgaagctaaagttagaaccattcgggataatctaaaggtggcccagtcccggcagaaaagttatgcagataaccgtcgccgtgacctggaattcgcagtggatgattttgtgtaccttcgggtcacgccattgcgaggagtacataggttccagacaaaagggaagctcgcacctcggtatgtgggtcctttccgtatcattgctcggcgcggagaagtcgcttaccagttggagctgcccgcctccttgggcaacgtgcatgatgtgttccatgtgtcacaactcaagaaatgtcttcgagtgccatccgagcaggccgactcagagcaaattgaagttcgcgaagatttgacctacgtggagaggccagtgaaaatcctggacaccatggagcgcaggaccaggaaccgggtaatccgtttttgcaaggtccagtggagcaaccacgccgaagaagaagctacttgggagcgtgaagacgagctgaaggcagcccatcccgatctcttcgccagttcttccgaatctcggggtcgagattccgtttaaggggggtaggtttgtcgcgtcccaaaacgactctaaaattcatcctcaaaattgtgccgagaataattaaaattcatgtgaaagcctccaacaattaaaatgtgcaaagataaaagtcaaatgaggcttggaggatttttatatatttcctaaaagcctaaaatgtgtaaataaattttagtggaattttcagagcacaaataataattgagaagaaataaacaaagttgaaaaggtttataaaaagaaaaccctaaaagaagtccttttcctccccttttcccttcttgggccggctcggcccaactcccccccctctctcctctccccgcggcccatcggctcctccccgcgcgcgcgccgctgacgggtgggcccgcccgccaccctcgctgacgggtgggtcccgcctgtcatcttcctcctcgcgccgcgccgccgcccgcccgtgccctagcgccgccgccgccgcggattccgccgcatcccgccgtccccgcgcgcattaaagagggggaaatcactccccgtgattccctctcccgtttccccctcttttccctctctctctccctcggattcgtccgatttgaatcccgcaatcgtcgccggtgtcttcaatggagccgagatctccgcggccgtttcctccctctccggccgcgctctccccctctcggcgctatatatttgctccccgtgcctctctcctccgtttccgccgctcgccgctcgctctcgccgtcggattcgtgctagcgccgtcctcctctctctccgccgtcgccgccaaccttcggttcgccgccgtcgtcgctccggacttcctcccgactcggcgccacctccatcggcttcgccgcgtcgtcgtcgaccccgtccgctcctccgtttcgcccgccgaccgccggagcaccgtcgccctcgtcatcccgaaccgcgccgccgcctctcgccgcttcggtcgtcgtttccgccgccctcgtcgtcccggggtgagccgaggaccgccgttcgctttccctcttctctccgctctctcgggcgccgctccgccgcgccggtggtcgccggcggtgaccatcggggagcgggtgcgccgcctcccgtcggccgtgccggcgaggccgccttcggccgcctcccgcggctgccaggtggggcccggccgtcagccgcccgcgcccgcgggtgcggctgacgcgtgggacccacggcgccgaccgccgccagccgcgtgctcccggtccaccgtggaccgagaggctgacgcgtgggccccactcccgtggacccggtccgcgcgccctctctctcggctgacgcaataattcgatttttaaattaaaatttaaatgaagaaattcgcaaatatccatttaaagagcatataaacttcaaatggccataacttggccatttgaactcggaattggaccgttcaagtctctaatttttccttaagaagtgaagaacccatttttgtgctttgtttctgctgttatgtggaatttattagtgtttgagccttttcttttccgttggtcgtgtagacgctgcagcttcggaagatccgctcttcgtggaagttgaagacggtgtttgggaaagcgagcaaggcaagacacatcatcttgatcatattgaatcccagtttataaacttatgttgatttaaattattgcattatcgctttatttaaattcccgcgttatcactgttttatttagccatgcctatttacctttgttatgaccttattattattgctattgttattattaccttgttcaccctagattaaacaaaaccccaactagtggacactctactcgtggtatcactagtatgattttaggtagatgcttcgcaatttaattaggtaacattaggtggttttacaactttagactttgggaatattcatatcacctgggcactttggaattgttggtttattgtggaattggattcacaccgctccctctattcaaaagcccccaaaatggttttaggctgggctcggggtgcatggttttgatagtagcacctcggccatataaggaccggtcttcgggcctctgttgcaaagcactaccgtacttccacatgtctagtgggtaaggcttagtttgtggctcagtctagttataaacaaaagtacacggattggagatggatgaagtcgggggtcgatggacattctccagggcaaatgaaggctacacgagctgcggcccggtagtcgagatgtcatggcagagggttggtgccctgctgctaggggctcagtcctgcctgcctgtcccggaggttccggccgtaggcgggattgggtcggtactcttgtctatggctaggatgggttggaaactatgtcacgtcttccgtctgtataccgtggtggtatgtggcacgtggttacacgtgagaaagacgtgtcttgtgggtaaagatgtacacctctgatcagagtttaatctattcgaatagccgcgccctcggttatgggcaagccgagcaatgtacccaagttagtgttttaattcttaaaacccgcttaacaactaaaatgtggaatggttggcctgggttggcttgggacgagctgggacccagggtcgggttgccagttcggtctgaatcatcgtaggccttgggttaaggcaggttcgtgtgggttcacggccttgattaataatattgtttagtgctaggatcgcgtttacaaaatagccttgagcaactaaatgtctttaaatgctgtttactgcaaccctaaccctttatattataattcccttgtactcccttgcatttattctgcatttgtgggtgtgtcttgttgagtacggtggatgtactcagtcttgctcaatttttcccaagtccagaagaggagttccttgaagatgaaggctttggtgtctagctcgtgcctgctgtcaagcgcctgtggtcgtcgccctagtcttccgctgtttttcgtttgtctttgtgtgctgggccttcgctgcccgtgtaataattctatttacgcttccgcttgttaaactctgaattgtatcagcttttggtgtaccttgcctcctgggacaaggattaatgcacgcacgtcaggaacgcccgttgggttatttccggtcgtgacaaccgtttaggcaggccccgggcgggtttgagtatctgtatgtcgcgatcgacaagttcactaagtggcccgaggcttatccggtcgtcaagatcgataagcactccgcacttaagttcattaagggcattacagcccggtttggggtgcctaaccgtattattacggataatggcacccaattcactagtgaacttttcggcgatcactgcgaagacatgggcatcaagctctgcttcgcctcccccgcccaccccagaagcaatggccaagtggagcgcgccaatgcggaaatcctcagaggccttaaaaccaagaccttcaacatcctcaagaagcacggcgattcgtggatcgaggagttgccagcggtgctctgggcgaaccgaaccacaccaagccgagcaaccggggaaacgcctttcttcctcgtctacggcgcggaagcggttctcccatccgagctcaccctgaggtcccctcgggccaccatgtactgcgaggctgatcaagatcagcttcgcagagatgacctcgactacttggaggagcgaaggcggcgcgcggccctccgagccgcgcgctaccagcagagcctgcggcgctaccatcagcgccgcatccgggcccgatcactctgcgtcaacgacctcgtcctacgccgcgtccaaacgcgtgctggattgagcaagctctcaccaatgtgggagggtccgtatcgagtgatcggcgtcccccggccgggctccgttcggctagccgcgggcgacggcacagagctgcctaacccgtggaacatcgaacaccttcgtcgcttctacccctaatagggttcgggtgtcaggtttcgggctcgggccaaccccgtacccccctcgggcgtgcagggttggccgggggctaccacacatgcatattcttatttctcttctatctgtatttcaataaaagcattttcgatttcctaaaggctgtgtctgtgctgttgtttccttttgaagaatcttgacttgaaataggtcactcgtgctcgatcctgccctcgggggctcgagtcggctaaaatcgccaaaaggggcccagaaccgagccgtgccccggggcgtggtgaactccgggggggaatcggcaaaaacccacaaccgggtcacccataaccctcggtcaccacgctcccggcctggccagtctcgacacgtggatctccccaggcactagccccgacccgagccatttgaggactgggacctgggcacgagcccttgttcgagctaagacacaaaaggaccatggcacagatcatcctcgttctcatacacacagtaaaatgaaattgacacagaaatttctttattttgattgcagagtaagttaatctatacaaaaaggaggcccgaaggcttcggaagaaagaaaagaagaaaaaactatttaaagattggcggggacctggaggctcactccgatgcacccgggtcgccagcctcgtcgccactgtcgcccacaccgccgtcatcgccctcctcgtcggagctgagggcgaacgcgagccgaggggccgaaccctcgaagctgtgaacgatatggttggcggcgtcctggaaccgcgcgcgcgcgccgtcctcagtcccgggagggaactcgtccagcgccatccatggggagaagtcggggtccctggcctggtaactcgccagtacgagctccaccgctcctcgggcaaggtccctcgaggatgacttaatcgtcctctcgagctcctcggggagccgttggagagtcccggccatctccgagaggcgctgagcgaggcccccctggttggcggcgtacttcgcagtccgcccgccccagagacccgcctgccgcccggcgcggtctaaacgggacacggcgtcgcgaagcatgctgggccctatctcgcctgccagacgaagggcctcgacctccccggtggacgaattcagcgcgccctgcagatccgcgatggtgtgttcggcagctgcgaggcgggcggctaagtcgctgtcgcccgtggccgccccaccgctacgcgcccttgcatccagctcccttgcctgcgcctcgagttcagcggcccgttggttcagtgcggccctctcggcgcgggcaccttccagattgcgacgcgcttgttcctcttgcgcagcttcgcggagggacgcgctctccgccagcctttgcgctgcggcctcggcctcctcgagggctcgctcccgctcggtgagcgcatcctcgcggaggcggagtgcggattcttcttcggcacaggcggcttcgtgcgccgccagtgtgacctcccgaatggcaacggcggcctcgcggtccgccaggtccctctccacgacgcaggcacgctcttccagcgccatggcacgggcctcaagggcttcttcgcgccgccgggatgccacctcggtctccgccgcccgccgttctcgggcagcggcagcgtcaaggaccccccgggcggcgtcgagcttcttccctagctccgcctcccagctcccgtattgaaggcggaggtcgtcctgcgcctcgttcatcacggtagtggcgatgagggcagccccccgctcctcctccacctccctggcgatctcctccagcaccttccgacgggcttcgagctctgaggcatgccggcggtgtgccttgcggctcacctccaccatggcctccaccgagtgtcgcccctcttcgacgcgcgcccatgcggcgtcgagctccgcccgctctgcttgcagggcctccatctgggcacttaacccgtccaacaccgtggtgtttgcgacggccaaggcctgcaaaaggggctctgcgctcagtggggcaacggaaggcgtgggggagagccgcctcggtgaggatgccgcgcggcccggcccgccgatggacgtgccgggctcggggacgtcccccggacctggcttgtcctgagtgttgcccgagggagtgggcccaagcgatgtgcccgcggcctcgtcgcgagctgcctcggaagttgtcgccgcctcggcttggcgaagtctggcttcctcccgagcggcttcttcagcctggcgagcccggacggcctcccgggcggcctcctcggcttcccgtaggcgatccgtggcttctcgccggtcagattctcgcctccgggcctccgcggtcgccgtatcctcggcctcagactggccggacttggaatggcgggagggacgcgacgagatctcgctgaaacagaagaaagaccagaagacaaacaagatgggtgagtgaaaactcgcgttgggagaatgaatacagccacaatgggcgtgggacgaacctgcgagggggtcggttaaacgactaccttggaggggaaataaggtttccccgggatggttctgtccccccatcttgcgaagccgtttcttcttccgctccccctcgggctgcggcgtcggcgcggccccctccgggcgcctgctgctgacacgcgccgccccgccccctcggggaggagatggggaggaggaaccctcttgcttcctcttccctcgggcgtcggcagggcggcagccccccgagcccccgtcacggagcccggaagcacgaccccctcctggggtagattgttctcccctgcagctcccgcccgcgccatcatggcctcgaggagcctgctcctctgaggccccgaccgccttcatgatggtcaggatggtggcgcgatctggatcgctgcagagggggaggactccttgggggatgagcgatgcctccgcggagctgagattcagcacccgttggatcattaccttgaagtcttcagggacccagtcccatttgaccccccggtgggtcctcatacagtcctcggacccggtgtactcccaggcaccccgggcgcgccgctggagtggtgcgatccggcgacgaaggtagtcgccgtacaccatggcccctgtgagcccctgggatcgcaggcccgccaggcggtcgaggacggcgtcgtagccatctcccagatctaccggcgcccgccagctggaggcctgcgccgggggctggttcggaagtcggaggcgcgcttcgtcggcgaggggggtgtagaaccagtcgctcttccagtcatcccacttcttgtggaggacgcaaggaatgtagcggttcagcaccggcccccgcggctggaagtagcagccaccaaccaccgacggcggcgacaccggctgtacggtgaagaaccaccggaacaaccgaagggatgggcgcaccccgatgaacatctcgcacaagtgcgcgaagatggccaatgtcattaccgcgttgggggtgaggtgcgccatctggagatcgtaaaactccagaacatccatgaagaaagaagaaaatagcggaaccagccctgccattgcgaaagggaggaagaaaacggtccgccccgggtagcgtggcgccgggcgtccctcgcccagcgtaactatctcctggccggtggcagattccggcaggaagcggcgcggcagcccggcctgcctctcgctcacgatgcgggaaagcggcagcacgctaccatcgagtggagcagagccccgtgccatgacgccggaagaagagatgtttgagagcgagcgcgtgtggcgagggtagggcacaggaaacaaggagttagggcgcaagcggcgaagacaaggggaataatggcgagaggaaggaagcaaatctcttcctcggtgtctttatacccttgccaacgctgtgcccggctcctcgcttctcgcgcccactatctcgctccctcgtttctcgcgcccacgcttccactaatcccattcgcccgcttgcggcgcatgaggtgaatatgcggctgtggcagtcgagatggaacatatcgtgcgcgcgttaattgcactcgccgaccgaagtgccatcaccatatctccaggcaaaacgaaccggctcgtcccgattcgtgtgctactcgagtaatgtggcagtcttgaagaggccgctcattattgacagtcgagttaccattgccgatgtgcgtgatttgcgaccgttgggtttctgcccaactgtagagaccagccccacttgtcaccaggcctaagtaagtggcgtcacgcccgaccgcttccctcgaggagggtgatcgccctggcataacgccgggggctactgtcggtgacatgggaccgggagtatcatgactagaggtttgggcaggagcaatcacccacgtggcctgaccccctcgggggggtcgggcccgaaggtgatgaggccgcccctctctttgtctccccgagggatcggaccgctcccgtttcggccccgagggccgaggcgccccgaccccttgtgggttttgcgccgcgtgtataggttaggtgagcacggcggggctcacctaaccgcatttattgcggtttgaacgagcgcgtcacgccgcatgtaacgcagtgcagcgcgctcgtttatccggtctgtgaccggtcacagaccggtcagatcgtgggttaggtggcaacaggcggtctgacacacgcctcgccccatcccgtcaggataagagcctccaggcacttgtccctagccggagccagcgtgctagctcctggagatgacacgttggtcccggtcagatatatgctaggcttcatcccaaccgttacaagcaagacattgtatgaagaagggtgaacatgcagattgataaactgacgcgtggtggacaagaatgaccgatttgtgaccggtctgacactggtcatgtcgtcggcagacagccatgttcccacgtcgcacctgcttccggcgaaagtggaggtaggtatgggccgtcccatcagaaggtcattcggacggcaaccattacaaatctccgcccatttatgaaggaaaggcgagccaagttttagtgaaaagaggatgggtccccaccaaaaagagaaataggtagaagtggtgcatgtggtatccccttgagatataaaaggaggaccttgcccacttagggaggggatccggaccagaggaccaggggaggagagattggagactcccggaggatccaggagaagatcccacgagaggcaaaaaggaggaaaggggtttctagagtttgagctctctggttctccagctctttgtagcttcttcgtacacagatctaccagaacacaggagtagggtattacgcttctcagcggcccgaacctgtatacatcacccgtgtcttgtgtgtttccactttcgcgaacattccacagactaggagcttagaacctcacccagggcccccggccgaaccggcaaagggggacctgcgcggtctcccggtgaggagccccacgctccgtcacatgatgtcaataatatgaaatcgaaatgtttcttggttgtaatgaaagcgttcgaaagttcgagcttgttttcgaatcttatagagaatcatgcactcatgcttcgtatttggcagttggttatactcgctccttccgcttttgatgcataattcgactactgagaaaagttagttaattgctgtatcgaggaaaagaagcaagttagttttatagcaggtacaatagcatactataagagtaagtttaatagtatagtccactactagctccaattcatccatagccaatctaatagctcattcatacaatagttgcttactatactattaatatatggccccagtcatacacacactgtgttttggagtccgtgctgcagctggctacagatctgtagcccgctgctattctttttcattttttatctcataaaaatatgtttatagctaactaatggtatgctattgtacctgctctaagccagctatagacatattttaaaaagataaaagaggatagagaagtgcagtgggctacagatttatagtcagctgtagtacggactccaagaggcaatgtgagtatgacatgtgggaccagatattaatagtgtggtatatgtttctagttaactattgtatgaattactattactcaatccttcccaaattgatcatcatgtaaaagaatctaaaaattcttaaattgatcatcatataactgcatggacacggatttcagcagaatacagttaatacagcatggaagaatgtgtgcatgctatggtgtaagtggcatgaggttttaatcgatgcatggtgggagaatgtgtgtatgttgtattgattgatgtgatttaaattatccttggttttggtgtataaaatcaatttgggaaggaaggagtagattgactatagatgatttagagctagtagttggctatactattaaacttgctcttagcagctccaattctatccttataaaaaaacttagaaataataggagtaatatactactggtatcatgaataaaagtacaattgacattcgacattcttaattccttcaattatttttttggtatctcaaacacatcttctctaacaaaagttcatttgcaaattttgatattctcaaacataccccaaaattttatcttagccaacggcagtcaagccgggtaaaactgttatttctcctccaaacaaaaccccctaattactcttgctccaaaacctccccttctcaagcgctctctcttaggttcgtcgtgtgtttcccttcaccctcccatggcgagcaacccaagcagctccgcggcgagggctgcgggctcccagggcggcggccatggtggcgcgcgcctcgaagacctagcactggacaaggtggcggaggcggccgacgcggtcgccgccgcgtcgagcgccggcgaggtcgtccgcgcgatccacgccgtcgccgccctcgtcttccccgtcgactccgctgccgtagccggtgaggctccgaatcctaatccgacatgctccctattcccatttatctcattcgccgtcacttggggtgtctgatggcctctcttgtaggtaccgtggacgaacccttcaggagccaggtgaagctctgtgctaattttaggccttttatttcgtccatctgagaaaaattactagtagttttatcatttgctatttttggttctggcataaacaatgatgtgtgatttctaataatcatggaaggggtctgtgataaaaaaaatggggaagtcttgagtttttgttttgacctgcaatcacaaaggactgtatgccgaaatggagcagtaattctgccacaaaaaatagaaatggagcattaagatatcatagtgaactattggttatgtggacaatgtttcagccgctgtaatgtcataattgtggtgcatatatttgaggaaattgatctctggaaggaattactccgaaactggattgataagcatccacagaattttccagttgataaacctataactttggtcacacaatgggtaatcgaattgcaggaccttgctaggtgagctgtagcagcacacattttgtaaaacctgtgtcatttgataatgcattcagaatacagaagatcatgtttcatgcttgagagataaattagtatggatattcaaagacacatgcttccttcaatatgattcagccaaatagccaattggagttccatccttttaggccatgatgtaacagggagaattattttctgtactttcagataattaatggcgtaagcctcagcaatgatgaacggggatcttggaggcatgctttttaccatggtccagcatttcctactatatctaagattttgcttggccgtaagtttactcttgaatctatcactgcatatatactttgtaccattgatattctttacatgtacaactctcctgtttgcttataatgttatctgccagtcatacaagtcatacttcatttgtattgtttatcgatctctacaatttgattactatacactcaaaacttcttgattgttcatcacagttaggtcagttgcaaagttccttcagttataatcccattctcacactttggttgtccagatgttgccttgaagtggttacgtcagatccgtgcctctgcaaggaaggaaatatatgattcgttttttgtcaaaggacctccaactgaagtcattcaagctcttgttcctgctttgtctcacaaaggaggctctaaggaagatcataacattatgtgttcaaatattgaaaggttattcatgaacaatctatcaattctattaagtttacacctgaatcttttattggtccaactttgtttgcttttactataagtctatagcacatccttctttttgacaattccctgtgagttcaaaacttcaaatattacacccaaaccttgtaggacaaaatttcaagtttcaacacttcgactacatgggtctgtactaatatcatgtatttgtccaatcgtctgctttgtattcttaagtctattttatgctcgagtcattaggaaatcaaacaatctagcatgcacacttcatctgaaaattcatgggtctgttcctatctggtatcttccttttttctcacccgataactatgttttgagcttggtgtgtcattatttccccccatttcaggctgttaattctatgtttggtcgagaataagggggtcagccagattattgcagagtttactgtaagcagcaagcacgatgatgacaacttgaacccaggcagagcagctttcatttcaagggttgctcaactacttgcatctgttccagataaaacaagaatgggagcttcacctgcactgacatcatcgtatcctcacccccaccgccccaaacacgacacacacaaacacaaacatctttgttatttttttcctttccttttattctgttagctttttctcagctaatatgtatttatttgcactatgtttgttcctccaaactgtaagtccttgatggaaaccaaggtcattcttcaagtgtgttgtcgatcagcttcttgttgcaactgaacaagcggctatggagttggctgctggcgaagatgctaatggactagatgcctccaattctgtgttcctcttcgtgggtgaagtgatatctcgtgttagccgtcgtggatctactggtgagtattcatccttcaggatgtagcttgacgtgtgcagtgtgctgttagtttatctgtttagacatttctatttactaatgggggcagttctagttggtgcagtaatggtttagcaatgcatttgtgtctggtaggattatagtgtattcaactcaacatttatgtttgcgatggtctgctactagggtgatggagcagatccttttttgtcctcatataatctttaatccttatgcaaactaatacaacacagtggtacacatttggttttctctgatggtccactaatagtcccttcagctgaaattttaaacatttaaggtagcctgtttttgggtttttatccagtgttcacttttggcaatcacagtagacttggggtctgcaatgcttgagatgtcacccaggatagcagtgcctcatgtcatggctgatcatcctagcacactgttctagtcattaacaacttcttgtttgtaatctatgtagccatccttttccctactatttgttgtatttctgataatatatcttgctcttttcaggcattttagttgctgagctgattcctaggatccgtagtcacttaaagagatgtatggaatctgatcataaaaccataagtcctgacaagatcaagcatgtttcccaattttggtttaatgtggttgaggctattagagaccagcattctgttgaaaggttggcggaagagatgttgcgccaacttgcatcacaacatacaagcgatgaggaggcatactggattctgtggactttgtttaatcagagcttcatgcacaaaactgttttgaggtgagaatgagatagtacatgtgcgcattttaatactatgcaacacttgacgtgcttgttttttagtttatccacattggttcatctgtgtctggcatgctacatttatctgtgaaggaaaaagtacttctgaggtttatttttttcagttagtggatgttttaggtaaggtgaatgatagtcttcagataccctgtatgtctttgttacttcattcctatgaacgacaaacagggtgccatgtatgtttacttaactttcagcatgggcttatattatgggtgtctattcagcgtataattggcatgcagcgattgatcaaataatcttcaacgtgtcttttcttttcttttctttcatcctttaattctctgtgctttcttcagggcaatgtttgttgacaaatttttgcgttggaaaacattccctctatgttgtctgagatggattcttcactatgctgtctttgaattgccaccaaattcaggcatagaaacacagaagcaaaggacatcgagcttccttggtacactgcaaactttagtcagtgtttggtccaagaaagagtttgtccaggcatactcagtggagcaacaagcttgtatcctttgaggcactcaaaactgtattacattacacactttttatttgcaaattatcatttgacttgttccccttaaacaacactcagacatcactgcagcaattgggttgtgtttggagaagatgtcaaaaagagaattagaaacaactaaagatgtattgaacaatattcttgaaggtgtaagctgtgagtatccccccccaccccccctgcattagcttatcatattattattatggtaatactgaatgctcttttgctgtaggtaggttagagagtccaattgatttaatccggaagatggccagtgctattgcattgacattttctaaagttgttgatccaaacaatcctctataccttgatgataactgttgtgagaatgttgagtgggactttggggttttatctccgaaggaaatcacagccccttcaaaggatgtagaacttataagcaaactgaaaccatctttgcctgagaacaagaaacatgctggtgagagaagggcaaaggctattaaacatgatacttcagagaacagggcaaaaatcattgagatcaaatcactagattcttgtgaaacgtctggttctgctgtgaatgggcatttcggagaggaagaatgtgatgaggaaataatgaacattgatgcctccagtgattcatccctggagccatatgatctgtcagacgatgactcagatttgcagaagaaattcacccaattaaaagatcttgctgctgcactacgaaaacctgatgatccagacggtgtaagtttctatctagtgctacctgtactttccagagcaaattattgtaaaattctgatcatcctccctttttttttacccaaggttgaaaacgctctgagttctgccgaaaagcttgtgagagcatcacctgatgaactacgccacaactcaggtgatcttgttagagcacttgtgcatgttcgatgttctgacgtggcaatggaaggagaggaagattctgctgaagaaaagagacagaaggcattagttgccttgctggtaacctgcacatttgaaccattagatgttctcaccaagttgctgtactcatcaagcgtggatgtaagtcagcgcattttgattattgatgttatgactgaggccgcacaggagcttgcggaaactaaaattgtaaggagagagctgcggcatggaaacttgatatccgacacctctccctcttggctagttcctagtgatcagggacctgctggtgcaggtccttggagggaagtctcagaatcaggaacacttctgaattggtcacaccggtatgaaagagaagttccatctagatctggtcaagttaaatcaggaaaatctcgtaaatggggtcttggaaaagctaaagatttgcagacagagtggtcaaaaaacagatttcctttatatgctgctgcttttatgctccctgttatgcaaggatatgataaaagatcacatggtgttgacttgctcaatcgggactttgttgtcctaggtaaattgatatacatgcttggtgtctgtatgaagtgcatggcaatgcatccagaagcatcagctgttgccccagctcttcttgatatgatcagatctaggtatgccaagcctaaaacaagcatttccgtgttaaagactttcttagttataaccaagtggtacgattttgacattggattttgtttctgcagggctgtttcgcaacatcccgaagcatacgtcaggaggtctgtgttgtttgcagcttcttgcatactgatagcgctgcatccgtcgtatgttgcatcatctcttatagaaggaaatcaggatgtttctactggtttggaatggatacgcacatgggctcttcatgttgcagaaacagatcctgatacagaatgcacatcagtaagtactctggtctatatctgttatcgatcacttgttcgtgttttgttcgtcgacgtagagagcaattatggtataataggatgacatttgtttcttaaaaccacacacaataataataggtcattttttgacgaacaaaggagtacagttatgctggttttgtatcaaagtttgtctgcatcgcctaatcatttcagtaacctacccttatatgctttagttttctgtaacctactcatttctctcattccttcagtatacaaattcagtgacccagctcttttcagcaatttgtaacgaaaaacaggacatatttttacttataagctggaaaccagtttttacttaaaagagaccaattcagtataagctggaaactcagtaacttttcacactgtcatctaactcctcccattggcatgtttgtcttcaagatggctatgacctgcctgcggcttcattctgagatggcccttcagacatcacgagcactggaatcggcggatcacagcaaggccagcagcagcagcagcaggtcgctaccttctaagcttgataacatcatcataccatttgccaacatgatgtgatcgatgtactagattaagttgtaaataagcatatattatcttgccatgtaatattagaaattccaggtcagctaattctgattaggcttgatattgtcatattacagggttttttaatctgggatttgaaaatgctagaatttttgtcgattcgtgtggagattgtatggaagttgtcctgatccagattaaagagaattgatgaaaattgtacccagattgatgaactgactaatagttgatgatgatgagtaaaagagaattggacgagtcatgcaggggcgaggtatccgtggggaccaccagccacaggatggggccactcctcgagcgttggatcagccgcgagggacgatccgacggaggagattcgtccggtccaggtatttaagcacaactttttgcgcttcgcagcacaaccacttttccgcatctctctctctctcgcgtctcaagagcagcggcaaaggtgagaggtgagatctctctcccacttcatcctcctctcctctgtggtttcatccgccgcctccatccctaaaccctacttcttctccgaaagcgccgtgagattcttctccctactcttcttcgatcttgctccattggtggtggtgtttgtttgcttggagtgtttggtgtcgcggtttctctcgttcttgtcttcgctgaatcgagcagcaccctgcgtcttggttggttcctgtttaccgcggtctggtcctcttttttcgtgttcttcgcttcccgtacccgtgatgttgttgcttgatgcatttgaggcgtggttttctcggagttggatgaggaggtcgacgagcaccgaagcttcatggttggtctccgttcgcctctctcccatcggagcacgttgatcttgacggttcctggcgcgaccaatgcgtgcgcgagaagttagacgccatgaattcgtttctcttctctgctttgtttttttttttggctcctgttttgcagttggtgtgttgcggaggtgtcagtttctgaatttgtataaaccaaatgccctcttcttattctttttgctgttcctgatgcaatctgcccgtcttccttacgtattgatcaagtagaacggcgcctcgttctcttctcgaattttaaggcgtttcggaatccgaaatttgctaagattttacctggccgtgatcatttttttcctcctgttcttggcttccctttcccgtgttgttgttgcttgatgcttttgaagttgggtgtgtgagtttcttggaggaggttgaagagcacggaagcttcatggtgatctcgttcgcctctcctcggaacatgttagtcttgatcttgccttccgtttctctatttggtcttgatcttgccttccgtttctctatttctaccagtgcaagctcgagaaattaaaccacatcaattcgtttctcttttcagtttgttctgttttggtatgctgcggaagtgccagtttctgaatttgtattagctagatgccttcttctgttcatttcgctgctcctgatgcaatatgcaggatgcttcttctctacacgtctctctgttttctgcctcgaaagaactctctgtcctattgtggctttgtttactcgatgctattttttcgttcaatgatttctgcatgtgtcgctccattgaattacttgtaaatcttctgattctttacctatcaaagaaacttccatctcttgaatcttgatttggcttccttctcccttaccgagatattgtgcattttttgtctgtaacctgtttttcacttctctgtgatggcgttcggtgccgtactgtactgttaggttgttcttgctttttttcttctgttcttcattctctgtttgcaattgtttaagttttgattcgccgaagcagtgccatatctaaaggaaatcgatcattcttgtacagtacactttatgcgctcgtttcctcttcttatctcactttgaaatttggtgttatgatatgtgtcagtaaagcttatatcgcgtttgtagaaaaccttgtgtgtattttgttcgcagtaataaaataagatttaggtgtaaaataatgcagcactgcaactgaagattgatacttccatgttatatatctcaaaaatgcatttaagcatttaagggccctgaatgaaagcaccaattacaccctgtgctttgagctagataagtagtgccatatcaagtttgatgattctacttcactttatttcatatgtaacctagctttctggcatttaattgatctgtattattgtttaagtgtctttccccgtttttgttaataatgttattttatatttgtattcatgttaaattttcagcaaagcaagttccgctatgggtaacagccttcctgtagaatcgaagttcacttttgaagaagagaatgacagaattaagtatgttgtgtcgtctatgcaaggatggggtgagaaaatggaagatgctgtgagtaaacttgcagccttttgtatgaaaaaaaaagggacagttctgcaaaatactgtgactgacatatgccctctatattctctagcatgcagctattctaaatcttgatgatgccacgtccacgtctttctttggtgtttatgatggccatggaggtttgctttcattctcattttttttttaatttcaaaccctccaaattgttggcgtaactgttatgtcatgctatgtttgtctgtgtgtatcactttgtttatctctgcgcatgttttgaaaactttgtggtatatgttgaaacatttacctgtcaattttcaaataaatatgatgctacagttatggataatgaacaagttagctaatcagtaatcacattcgtgtggcatgcttgcaaggataacatgaactacataaaaagaaattttaattcatgagagataaaacactgcatgaatatgagttactagtaatataaatggtgatgataatttagaggataattacagattaacaggttagtttttttttaatgatgcctattcaagtgttgttctgctactaatgttcacaacagtgttttgatttataagcttctatgcaatagaagtaatcttgatccatcgtattgagcgagacgccatactgaattgtttttttctatctcaggagctgaagtagcattgtattgcgcaaaacaatttcacattgagctatgcaatcatgaagactatcacaacgatctgattaatgcactggacaatgtgtttttaaggttattttggcctactttacataattttgtttatagctgcacttggaaatgtgggatatcattgttcgtgtgattgctgcagcatggatgagaacctgcaacagtccgatgcttggagagagttagttattcctcatgataatggatgtatgtattttctcaaggctggtgtctgtgctaagcctttcccacaggtagtaatcttttaacccctagcatcctcaaatattcatatcgtgaagaagttactcaaaattgtatttgttggacagtgtgcatattgtatctatgaaaaaggaaatggaagaatgtgtttgatatcgagactgttgttctttcttgtgatgtactttggagttggaggagatatgtttaaccctaatctcgactaattgctcctattaaaaaaggttcaattagttacatatcaattggctggtttactgagttggaggccaacaggttcttaagttctcattgcaccttggttcttatcatactatgctatccaaattgaggtattgtttgcgatatcccttcgatggttatttctttcatacattggtttggttttcagaaatgtttttctatacctgttggctttcttgagctattttttggtagccttttccttctaacaatgttgtgattctgtgttatatacttcagtttggttgttgttttcccaggcgacatatactgggccagcgtatgaagggagcacagcatgtgtggttgtcatcagaggtaaccaaatgattgttggacatgttggtgattctcgttgcgtactctcaagacagggtggcctggtatagtgattgtttccctattgaatttctggttaatacctaatttgcaagctcgttcattgtggtgcctaacatttgtgcttgtttccattttgtcaataggctattgatttatccttcgatcacaaaccatgcacaagaactgagtctgaaagagagagagttcaaaatgcaggagggagatctcttggacttaggtgtgaacaagtaatggggaattatgtagtcaaggaacaatgggtcctcggtgattttgggggaggtgtaacaatctcaagatcaattggtatagtcttgtctggatctgtttttcattgattgcatgtaatagcacaaaaagaagcacattacactgtgattggcgttttacctacttacatttcaggtgactttgctttcaagaagaacaaagatttagatcgtgaaaaacaaatgctggtatgtgatccggacatcctcgctgtaagtgtaactaagtgtaaataggtccgtttggtagaatatgaagttcagttttgccgggttgggatctgatggaaaattgccctttcaatgtcaggatgacataactgatgacatggagtttcttgttattgcaagtcaaggtctctggtaagtggtaactcttcagcaaaaaatacctgtcaataactattggatcatttttatgtcaccagtactcattggcattctcttttttttttttcctcctatttggttcatatatagtttcactcatagttccatactaattgcattgactactgtatattttccccctgcaggtcttgcgtggacagtgcggacgtggtttcttacatacatgaccgtttatcggtggtgagtcttttctttccctcagtttgtcttcttggcaggacaagatatcttagtggtgttaatcatgctatctgttctaggaaatgacttcaatcaagcaatgtaaatatcctgattttctcttttcttttaaaaaaaaactgtgtaagccctaaacctcacaaaaccatttgttagtttagcactgaatatgcatgcctggctgacaaactgccatctgctttgacttcgattctttcgctgttaaaactgctgttaccaataatgctgtgaccaattaatattgctatgcaggagggtgcagagctgcgtgtcatctgtgaggaggttgttgagttcggcttggcatcgggcgagaacactaccgtcatcctggttcagttcaagcccggcgccttccagtaccagctggtggatcccgctggatttggcactgccgtctctaacattgccagcaccagtgctgcgccggctggtgccagcgacacaagcgacgagggcgtcatggccgactcctgcgccacggctgacaccagcggcagtgccagggctgagagcggcgagctcgtccccactcccagcgccaacaacaccgtcacggatgaggtcgatcccactggcactgtcgcagccgacgacaaggtcgatcccaactccagcgccaatgccgacgctgacgacggcgctcccaaaccttctctcggcgcagtcatcgagtccgacgaggtcgccctcgatgccactgcaacgggccatcaggtggccgtgcgtcagcaggaggaattcgacccaaagaagtgttggatctgcggaaaaggctacaagaagattcttcttgaaccttcttcggccagggcgagaaacccacttctggctcacgctaagacgtgtgagtcggaagacaagaaggcgaagaagaagataaccaagtatatgatgaaagccaacgtcaccaaccagtatcattgatactgtacgttaactacttgcacctgtacgttaactactttgcttttggtgaagttttcctcattcttctagctctatgtgatacgttttggttttaaatcgattcatgcattggataatggatgttggtgaaatgaagggagtaatcagtcatatggttggtttaatgggaaagtctatttgtggattaagtagatccatgccaccatttagcagtgatggctattcggtcaagtcttccgataacaccaccatatcttcagcaactcacagtcgaatgaattatttttctaacttattttgtataaaacgaaatcctaattgcaaaaattttagatctttctgtatcctcaaggacttaagtgtgccaaaagatctcggtgggtctctccttgatatcccaaaaacttcatcccaaagttccattacaaatcccaaggttcgaattttgaaattcaaaacttgcctaaatccttgtgaatcacccaaaccctaaatccttccctcccaaaaaaattcaaattttccgagaaaatcatccaagcctataattttattattcccttaaatcctcataaattactgtgcacaaatatcaatatcaattcatgcaaaaattgcattggctgagtgcataatattaatagcgccatgtttcaaccaacaaagaaatattatatcaaatttcatttgcgtcgattttgattttggcctgaaagaagagtaacttcattgtgagatgattcactatatgaaaatataagagctaacaacgtcaatttgtgtcaattagtactaaaatcaacccaaatactataatctactctctccgatccccaaaactctcttgcgtcttgctgcccaaactcgtagaaccaaatatttatgtccgaggtgatctccttggtgttagacgaactggatgactttggtacaaatgctgtttcgccatcacgtgtaacaatgtcgacatggatagtctcaggccagtcatacagcctcgggaggaacaccttgttttgcatcaatctaagcttagtcttcctcaacattgtcgtgtatgtcccggtgaacaacgcatgtccttccaatgaccgcatcttctcccactccatcgtctcttcgttgagcttgacgacatggataggcgcaccactgtagccgacgaggacagccatgagcgcgccttggtcggactcaaacaggtggctatcaacttggtgtttgattccaaagcccttaggtttatcgggaactgtaaaattattgtcgtggttgcatggatcatacaccgccatcttcccgtcttcaccaagaacatacaacaaaccaccatggagcaccgggttgctgatcggcgccgccagaagttgcggtccttccacgtcaaagtccgttaattcccagggcccccactcgccgtcgtcttgttgggtcgcacgggcgagctgtagcgcgtacgtcgtgttgacgcaatacatcctccgcgcgtgctcatcgtagacaataaactcgaatgaatagaaaggcatctctggcagctcatacatggtgccggctacgagatcggcttggaggatcaatctaggtagacacagcgtgaggtgttgtccactggagcagcagatcctagccgcaattttgggcaccttgaggagcgtgtcggcgatctcgaaacacctgtggtagtaggggctgtagtacctgacgttcgtgacgccgatgtcggcggcgctcaggaggagaggcgtgatccacgccgggtagaagggcgacacggcggagcgccagtgccggcacgtcaatgcgaagctcgggtgggtcgaccacccgagccgatccaggacgagcacgagcatgtccaacgggagagacgaccagtcccgtagtccctgcgccgccgtcgcagtggcctccatctatctgcttggcgaatctcgagggttcgtgcaccgcaatggcctgcttggcgcgctgcgttttgtgctgctacggagctctgctttcttgacgtgtttcctccggactcatatataggtcggcttccgcttctgcttgtagtttgtatacccggcacggttggtttttgttggttgctatccaatctccatagatgcatatgtggtgatccctctttatccccggcccagattactgtttccttttactgatttaccggcccaaagtactagtactataatttgtttgaattttgatgtcgtgtaggaattcatgtcctaattggtactagtaatcgtaggtcgtaggcgtgcagatttcttcgcttctctttcctatatgccagtaattgcactgctcaaagcctctcctcgtttataaagcaccgccaaattcgttcgttttcaattgaccggccgtatcctacctgtgggacagtcggccatcaaaatcatggaggaggcaggcgatgcatctgcagcagtactggatcccaagcttgctcctctgcttctgttcggccacggcgacgccacgtccctgtacagcgtgccggcgagagcactgctgccaaggagggtgggcgacggcggcgtcgacgacatgatgagaggccaccggtggtggaccacggcgcagggctggctgctcatggcgcgccgcggctcgccgtgcactttcctgtgggaccctttcaccggccgccgtgtcgggctgccccccgaccacgacggcaccgtcctcgccgccgaaggcagcagccatcgccggaggtgcctcctctcgtgctgcggtcccatggacccggccagctgcgtcgtgctcgtcatcgaccacgccgacacggtgctctggtattgccgccccggcgacaaccactgggtgaagaggcatcagcaccagtacctccagcctgggccgcctcaccacgagcaccgcggcatcgtcatcctggcgttacgccagctcacggcgatggacggcgagttctacaccgatctcatcgaccatgtcgccgtcctcgagttctcactggagccggcgttcaccgtgaccgccgtagacgacgacgacaggaggccggcggtgtacatgaaacgtaccagcatctttgtggaatcgaacggggagctgcactccattctcttctctcacccgattggatgtgatcggattgtcgctggtgttggcgtttacaggctgagcatggcgacgacgcaggagcaaagatcagcgtgggtgaaggtggattcgctaggtggcagagtgttcttcgttcagataggctgttttggagcgtcacttgatgcacggacaacaggcttgagagggaactgtatctactactcggggttcaatgggaaagcgctgtgtgtctacgacatggaacgaggaactacggctgtaatcaaccccggagaacatcttccatatcaccagtcgcctaaaatattgatgccaaccagatgagcatttcttactccattcgttcgaaagtaatatggtaatctaaaattggatggcatgcattaaagatgtacaccaatgtagctatatctcgtctattaattttataagatttaatttcataagatataatatttttctatgaaacggggtaaaaatgacgggagatttgcaataatgacactgcaaacattgacctttgctataatgatactggacacatatttcatagacacatatggacccatttgtcatccactcggagtgtcaagacagcgaagccctaatgtttgttgtcccaatattgcaattttctctaaaaggaccctgggtgttgcagcgagagatcttgctatgaatgatagctcaacttggtaaattatctttgagaaaatagtttacaaaatattaaaatccagaagaacaaaataagagtcaggttcaactcaaagccaatttttcgagtacagtatatatatgaaaatgggtactcctagggagtacatactcccgctcctattgaccgtccatcgaagcaagccccgatgaagcccgttaccggatccacacgcggtggacaaatttccgtccgcggtaatcggaaaatcgaaacaatgttgagctcgcatataaatccctctcgacagccctgatcgataaatcaggttgtcaacgggcgattcagagcgaacaacggcgattttgtgacatcaatccatggcacaggtgatatgagattctctttccgtcttctttgcttttctcgtggagcttcctcttgttatatcagtttttattgctcatgcacgagaaacgatctttaatacctgttcgagactagtaatcgagactaaactttttgatgtttaattagtaccaattgaaacaacatgtagtaaagatgcatactaagtaaaaaaaaataatagtatgtgagatttgaattcaacatctcgtagcataactgtacaatactagcagatatattcatagttttattttatttcttcttaacccttgtttagttctaaactttttcttcaaactttcaactttttcatcacatcaaaacgttcctacacacacaaacttacaacttttccgtcatatcgtttcaatttcaaccaaacttccaattttgacgtgaactaaacacacccttaacttaactatacctggtaggcattcttttcatttccctgtcctctgctcagaaattgtactcgagcagtacgtgttgagttccgcacacagaatgtaatacgtgcagaatagaacaatactagtactaccattatgtagatgtggatgtttctgttgtaaccatgataaattcatcatggtttcttcgggaagcatgatgtcggtgacatgggaccgggagtatcatgactagaggtttgggcaggagcaatcacccacgtggcctgaccccctcgggggggtcgggcccgaaggtgatgaggccgcccctctctttgtctccccgagggatcggaccactcccgtttcggccccgagggccgaggcgccccgaccccttgtgggttttgcgccgcgtgtataggttaggtgagcacggcggggctcacctaaccgcatttattgcggtttgaacgagcgcgtcacgccgcatgtaacgcagtgcagcgcgctcgtttatccggtctgtgaccggtcacagaccggtcagatcgtgggttaggtggcaacaggcggtctgacacacgcctcgccccatcccgtcaggataagagcctccaggcacttgtccctagccggagccagcgtgctagctcctggagatgacacgttggtcccggtcagatatatgccaggcttcatcccaaccgttacaagcaagacattgtatgaagaagggtgaacatgcagattgataaactgacgcgtggtggacaagaatgaccgatttgtgaccggtctgacactggtcatgtcgttggcagacagccatgttcccacgtcgcacctgcttccggcggaagtggaggtaggtatgggccgtcccatcagaaggtcattcggacggcaaccattacaaatctccgcccatttatgaaggaaaggcgagccaagttttagtgaaaagaggatgggtccccaccaaaaagagaaataggtagaagtggtgcatgtggtatccccttgagatataaaaggaggaccttgcccacttagggaggggatccggaccagaggaccaggggaggagagattggagactcccggaggatccaagagaagatcccacgagaggcaaaaaggaggaaaggagtttctagagtttgagctctctggttctccagctctttgtagcttcttcgtacacagatctaccagaacacaggagtagggtattacgcttctcagcggcccgaacctgtatacatcgcccgtgtcttgtgtgtttccactttcgcgaacattccacagactaggagcttagaacctcacccagggcccccggccgaaccggcaaagggggacctgcgcggtctcccggtgaggagccccacgctccgtcatctgacgcgccatgtagggggttctgcgtgtgtttttctaagctctcatactctttcgtgtgcgccaagcttttcctgttcagcccaatggctaaacaagcaaaagcgcacaagctctctccgagtgttagcggtgacgacggggagccgaacccacgccgtcgagctcgtactccaccgccccctccacgccaaagtcctaggcgggaggaggcgctcgagagggtcgaaggatccgcgacttcgacatccacgggtgatggagaagggcgccgagatggggagcgtcgcctcctcgtctacggcgacggtagcacgccccagggcgcgctccaagctgcgggcgcgctcctacgtcacccgcccgtcgtccctgacccggagtctccagcccaacgttggctggacgacgtagccaacttggtcatgacggcacggcagcacctaggtgttggtgggcggtcctccgccactgtcacgtcccaaatcgactctaaaatacatcctcgaaattgtgcaaagaataattaaaattcatgtgaaagcctccaacaattaaaatgtgcaaagataaaagtcaaatgaggcttggaggatttttgtatatttcctaaaagcctaaaatgcgtaaataaattttagtggaattttcagagcacaaataataattgaaaagaaataaacaaagttgaaaaggtttataaaaagaaaaatccctaaaagtcttctttccccccccttttccttcttgggccggctcggcccacttctctccctccctctctctctctcctcccctccggcccatcggctcctccccgagcgcgcgccgctgacaggcaggcccgcccgccaccctcgctgacgggtggggcccacctgtcatccccaaccccgcgccgcgcccgccgccgcccgtgccctagcgccgccgccgccgccgattccgccgcatcccgccttccccgcgcgccataaagaggggcgaattactccccgtgattccctctcccgattccccctcttttccctctctctctccctcggattcgtccgatttgaatcccgcaatcgtcgccggcgtcttcaatggagcccgagaactccgcggccggtttcctttctctccggccgccctctctctctcccgtcgctataaaatcaatccccgagctccgctcctccgtttccgccactcgccgctcactctccccgtcggaatcgagcccgcaccgtcgcactttctctccgccgtcgccgccgtgctccggttcgccgccgccgtcgctccggacttcctccccactcggcgtcacctccatcggcttcgccgcgttcccgtcgacctcgtccgcgcctccgtttcgctcgccgaccgccggagcaccgtcgtcctcgtcgtcccgaaccgcgccgccgccttcttccgcttcggccgccgttcccgtcgtcgccgtcgaccggggtgagccgaagaccgctccattcgcttcccccttccctcctctctctcgggtgccgctccgccgcgccggtggtcgccggcggtgaccatcggggcgcgggcgcgtccccctaccttcggccgtgccggcgaggccgccttcgggcgcgccctcgcggctgccaggtgggacccggccgtcagccgcccgagcccgcgggtgcggctgacgcgtgggacccacggcgccgaccgccgccagccgcgtgctcccggtccaccgtggaccgagaggctgacgcgtgggccccactcccgtggacccggtccgcgcgccctctccctcggctgacgcaataaatgagatttttaattaaaatttaaatgaagaaattcgtaaatatccatttaaagagcatataaacttcaaatggccatatcttggccatttgaactcggaattggaccgttcaagtctctaatttttccttaagaagtcaagaacccatttttgtgctttgtttctgctgttatgtggagtttagtagtgtaaaagccttttcttttccgttggtcgtgtagacgctgcagcttcggaagatccgctcttcgtggaagtcgaagccgtcggttgggaaagcgagcaaggcaagtcatatcatctttgaacatattgaatcccagtttgtaaaattatgttgatttaaattattgcattatcgctttatttaaattcccgcgttatcactgttttatttagccatgcctatttacctttgttatgaccatattattattgttattgttattattattaccttgttcaccctagagtaaacaaaacctcaactagtggacactctactcgtggtatccctagtttaaatttaggtagatgcttcgcaatttaattaggtaacattaggtggttttataactttagacttgggaaatattcatatcacctggacactatggaattgttggattattgtggaattggcttcacaccgccccctctattcaaaatcccctaaaatggttttaggctgggctcggggtgcatggttttgatggtagcacctcggccatataaggaccggtcttcgggcctctgttgcaaagcactaccgtacttccacatgtctagtgggtaaggcttagtttgtggctcagtctagtcataaacaaaagtacacggattggagatggatgaagtcgggggtcgatggacattctccagggcaaatgaaggctacacgagctgcggcccggtagtcgagatgtcatatggcagagggttggtgccctgctgctaggggctcagtcctgcctgcctgtcccgggggttccggccgtaggcgggattgggtcggtactcttgtctaaggctaggatgggttggaaactatgtcacgtcttccgtccgtataccgtggtggtatgtggcacgtggttacacgtgaggaagatgtgtcttgtgggtaaagatgtacacctctgatcagagtataatctattcgaatagccgagccctcggttatgggcaagccgagcaatgtacccaagttagtgttttaattcttaaaacttgcttaacaactaaaatatggaatggttggcctgggttggcttgggacgagctgggacccagggtcgggttgccagttcggtctgaatcatcataggccttgggttaaggcaggttcgtgtgggttcacggccttgattaataatattgtatagttctaagatcgtgtttacaaaatagccctgagcaactaaatgtctttaaatgctgtttactgcaaccctaaccctttatattataattcccttgtactcccttgcatttattctgcatttgtgggtgtgtcttgttgagtacggtggttgtactcagtcttgctcaatttttcccaagcccagaagaggagctccttgaagatgaaggctttggtgtctagctcgtgcctgccgtcaagcgcctgtggtcgtcgccctagtcttccgctgtttctcgtttgtctctgtgtgtgctgggccttcgctgcccatgtaataagttaactatttacgcttccgcttgttaaactctgatttgtatcaacttttggtgtaccttgcctcctgggacaaggattcatgcacgcacgtaaggaatgcccgttgggttatttccggtcgtgacaagttggtatcagagcctcccttgaccctaggacgagccgtagatcccaagccttagcaatattttcaaaaataaaaatcctttgttatttgtgaaaactgtctagtctctctctgtcttgctgcttcacttatcatcaaaatctgacctttaaaatgttgtttctctttttgtttttgtttgtagatggccggcagcgtcacccgtcatggtttggacatgactggcttcgtcttggagttgcgaggcatgtgcgtggtcttggggtatccacacggagtggactaccaggccaggccgcttccggatcaggagggagacgacgcggagccccacgctgggtgggaggtcaccgcagtgatcctcgccggctcttctgagcgggcttcgttggcagtcaccgcgggtggagactccttccccgccgcttgccagagcgccgctctcctcgccatcggcacccttcaccagcgctacccggacgagttgcagcactcgccctaccgctaccaccctcgtcgcggaggagcccgcgactacgccaccttccgggatgctagctcggaggatgacgctaccatcgtgcacctggcacgcatggtggaggcgtacgacgcggctcgtatcgacttccatcagatggtacgccgcgggatggtcgagaacaacatgaagatcctggagctgcgccaggagaacctgcagctcaagaaggacctcgacgcagtggaggcgcagctgcatcagctcaagatcgcccagggagagatctgccgccccaagcgtcgccgtgtctgccgcagccagaagatcaccgcccgcaagagcacctccaggcctgagcttgtccgtcagtccctggcgtggacctgcttcgtcgagacccctcgtgccgagcctgcgcccgtggttccccaggagggggaagcctccggcgttggtagctcggagggtgcgctgttgctcaccttccgtcctggcccgtcgcagcggtagacgagcagttagtaggcttgcgcgtgtgttctttctcgtttgtcttttttggagtcgtgtggggcatggttatgccggtgtgtggtgtaactatgtcggagcctgtcttattttatttgcctaagcaacttgaacattaatgaaccaatttaatagcagtgataaatttaagaataatggtagtcgtgggtggatagttttaattgttagctccttctctgtttgctggttctgtgtggggttttcagatggtgacgaccaggagaaatgctgctaccggtgatggcaaccaacctgaaggcagcaaccacaaccaccagggcaacccacctccacctcctcctccgcctccgccaccaccaccagacaccaacgccattctcacccaaatcctcgcccagcaagccaacatgatgaccgctttcctccaccacctccaaaacccgccacaacagaatgctccaccaccacctccccaacactctaaactcgccgagttcctccgcatccgcccacctaccttctccagctccaacaaccccgtggatgctttggattggttgcatgccgtggggaaaaagttagacacggtgcagtgcagcgatgaggagaaagtcgtcttcgccgcccatcagctgcagggacccgcatctctctggtgggaccacttccaggctacgcagccagagggacagccgattacttgggctcgcttcaccgccgctttccggagaacccatgtgcccgctggagtcgtggctcttaagaaaagggaattccgagagttgaagcaaggcaaccgctccgtgatggagtatttgcatgagttcaacaacctggcccgttacgccccagaggatgtgcgggaagatgaggagaagcaagagaagttcttggcaggaatggaccctgagctgtccgtccgtctagtctctggggactatcctgattttcaacgactggtggacaagagcatccgcttggaagccaagcacaaggagttggaatcgcacaagcgccgcttggcgaatttccgcaatcaacagggtgctaaccagagggttcgctacaccaatccctacccagggggatcctcctcgcagcagcagcagcagcagcagcagcaacctcgcccagcgccccgacctcaattcgtggtgcgcgtcccacagccgcagcagcagcagaatcagcaagggactcgtgcgccccgtcctcctacgccagctgtgcagcccgttcaaggccgcagggacgctcaaggtcagcagcgtctgtgcttcaactgcttcgagcccgggcactttgcggataaatgcccaaagccaaggcgtcagcaaggccaagcgcctccccgctccaacaacggcgggaaggatgtctgtcacgcccggaatttctatccaaaattccaaacgcttacatgtgtgtgaaccctcgtccaggaatcagccgaggcacacaataacaaattgataatagagtacaaatattactctaattaataagcgaatagaatgtcattacagaggtagatagttcctctcaatcaataaagttctaagcagcggaaaataaataaacggcgtagacggctccactccacaggcagcttgaccaaggctacacctaatcctccacaccatcagcctcattgtagaactcttcctctgatgaatgattgcaaggtgagtatatgacatactcagcaagccacgcagcaaatatgcaagtgcacaggataacaaaggatggcataatagggtttcatttgcaaaagcagcatttagcaaacatttgagaatttaacaaaacagttaagtaattaaacaatattaagccaacgctatacaacataccctgttgtataggcccaaccattctgaacaaccaccccggctgcacagttctatctccaaaccaggaatgtaccattccaaaccaggagctaatcaaattattaccagttatagcatcttttataatgatgagaggtgtgagactaatcacgaaagacattgttagacccgcccataaccgcgggcacggctattcgaatagttttactctgatcagaggtgtaccactgtacccacaagacacaaccccacatcatgtcaccatgtgcctcaataccaccacggtatctcggaaaggagttgtgacaatacccctcgcataacacaattcactgcagcgcaccttcctggatcataatcacccccttataaacaaggcatggactccccagcgacccccgtgggcttatctccgccacttctcagtctggtgccccgcaatgaaccatgctatacaaaagataaagccgttgcccatgctggcttgtggttggcacgataaatgtttcacaaccgaaactcgtgaaccggtccttaattgtcatgagcacgaccatcaaaaccatgtgctcacaacccaccattaccaggttttagttggcacaataattaattaactaatcacgattgaccatcgtgaactatcaataagccatcatgaaataatagtgaatcattagttatcccataagtgtactaatgtttctaagcagggctaagcaattatatctaatatctagttgaaccaatataaataaagctcaactagtcaaattaatataacccaaggtatcaaggaataaggtaatcaagtacgaaagggccataacaaagaataggtcaattccacccaatgacattcgaaaatagatgcaatagttgaatagaaacaatagctttaaataggatcaacatgctcaaagggttgtttgggatctgtgtgacttgccttgctggccttggaactcttcaaactcttcttccgcgaaaacggactctccggaaacgacggaatctaagcagaaaagagcaaaatcaccaaaacagcacataaacaagcatgaacagtacatgtggatatttttaatgtgtagatctcaattttagaaaaatttagagacttgaaccaactaaatcggagctaagatgaattagttatgaatttttaaagattaaatcggattaaaacacttaaatcggtttaaattgaattatgacgcaataatgaattatttttgaaaaggaaaaggggatttattgcgtcagcgggctagggtttggtggaccggcgcatgggcggcggttcacgcgaacggacggccgagattgatccgatccaaatcggacggctgagattgatcgagtccacggcggttcacggcggacggccttgatgacgccagcaatgacgtcaccgacggcggcggcggctcggctcggcagacggctcgggcggcgcacgctcaccggcgaacggcggcgctacggcacgaacggaggacaccaacgggtagcggacggcacggcgaacacaccgacgaccaaaacgacggcggagaagcaacggacggcgacggcgacgagaaggaagcggcggctaccttcgggttgtcgacggcgacgaagctccagcgggttccgacggctgcgaaggggcggacgaggacggcggcgacttggcgatgacgacggcggtcttcccgagcggcggcgacagctggagcgacggcggagcacggctgaagcggcggcggcgacggcgaagctagggcacacggcgctagagctactccggcgacgagaggcgaaggcgagggctgcgacgggtagaggagacaccgggggtccttttaaaggggctcggaggcggcggcgaaggcccacggcgacggcaacggcgaaggaaactcgcggcttggaaagagggaaaaccgatccgaatcgaactcgattccaaagctttccaaagcgatttaaccaaagattccaaaggagaaaaggtagaggagatcccggagatcatttcccctctattgattcggccggagaaggaaagaggcggccggatttggaaagcggcggcgacggcagctcggcggcgcgaaactagggtttcggcccgaggaagacgacgactgacgggtgggccccacctgtcagcggccgaacgcgcgcgcgcggctgcggactgggccggctgggccgaggagagagagaagagaggttttgggccgactttcggcccaaagccaaaagaagactttttaaaacctttttcaattaaaattatttcttaaatgcaattccatttattaaaaatactttcttagctcaaataaatcccagaaaaatctaggaattatagaattaagcaaagtatttaatgaaattttatctggcccaattttatattggaatttattaattaaacatagattttcttttcaagacttttaaaattatttctaaaaattccatttaaacaacaatttatatattttgaattttcagggtgtgacaaacctaccccccttaaacagaatctcgtcctcgagattcggaagaactggcgaacagaagcggatgagctgactttaattcatcttctcgttcccaagttgattcttcttccgagtgattactccattgaactttgcagaaacggataactcgattcctggttcttctctcatttgtttccagtatacggattggtttctcaacataagtcaaatcctcttggacttctatctggtcaatattagcttcttcggtaggtacccttaaacactttttcaattgcgacacatggaacacattatggactcctgccaaggattgaggtaactccaactgataagcaacctctcctcttctgctgacaatcttataaggtcccacaaaacgcggtgccaattttcctttggtctgaaaacgatgaactcctcgaagaggcgtgacacgaagatacacataatctccttcttcaaaactcaaatctctgcggcgattgtcggcataactcttatgacgagattgagccactcgcaatctttcttgaatgatctttaccttttcttctgcttcccttaggatatccgtcccgaaaacctgacgttctcccgtttgatcccacaaaagcggagtgcggcacttccgaccatacagtgcttcgtaaggagccatctgtagactagcttgataactgttgttgtacgaaaattctgcatagggtagattcttatcccaacttccaccgaaatctagagcacaagctctcaacatgtcttccaaaatttgattcaccctttcggtttgtccgtctgtctgcggatgataagcagtactaaagttcaacttagaacccatctcttcctgaagtttcttccaaaaatttgaagtaaactgactgcctcaatcagacacaatcttcttagggacgccatgcaaacacacaatccttgccatatacaattccgccaagcgacttccagaataggttgtctttaccggaatgaaatgagccactttggtaagtctgtcgactatcacccaaatagagtcatggcccgatgacgttctgggcaaaccagtgataaaatccatacctatttcttcccatttccattcaggaatcttcaaaggttgcaacaaaccggcgggtttctgatgttctgccttgactcgctgacaaacatcacatactgctacgtattctgcgatttcacgcttcatacttgcccaccaaaatctttccttgagatcctggtacatcttggtactaccagggtgaatggagtataaagtatcatgagcttctttcagaattgcatcctttaagtctttgttgtcggggacacagattctttcacccaaccatacagttccgtgctcatcttccaagaaaccaatagcttttcctcttctcatattcttcttgatctcttgaatatcaggatcattaatttgggcttctctagcttgatcaattagagtgggcttcgcttctaaggctgcaacgaaacctctattgacaattcccaaatttaatctttcaaattccttgcataattccaatggcaactgtcgtccatctgtcacattgcaatagccttttctgctaagagcgtctgctacaacattagcctttcccggatgataatgaattcccatgtcataatccttaattaattccaaccatctccgttgtctcatgttcagatccggctgagtaaagatatactttaaactcttgtgatcggtgtacacttctgtatgagtaccgaaaagataatgacgccaaatctttaatgcatgaacgactgcagctaactcaatatcatgagtagggtagttcttctcatgcggacgtaactgacgagatgcataggcaaccaccttcccatcttgcatcagaacacaacctaacccaagtttggatgcatcgcaatacacttggaaacccttctttggatcaggcaaaatcaaaataggagctgatattaagcgacttttcaactcttgaaaactctgctcacattcttccgaccacttgtacttcacatctttctgaagcagtcgtgtcatgggcttagcaatcttggaaaaattctctataaacctccggtaatatcctgcgaggcctaggaaactgcgaatctctgaaactgtctttggttgcttccaattggttacggattccacgttactaggatcgacggcaactcctccggctgagatgacgtgaccaaggaatttcacttcggacaaccaaaattcacacttgctaaacttagcatacagttgatgttctcgtagcttctccaatgcaagacgaagatgttcctcatgctcttctttggttcgagagtagataagaatatcatcaataaagaccaccacgaacttgtctaggtattccataaacaccttattcatcaagttcatgaagaaagcaggggcattggtaagtccaaaagacataacagtacattcgaacaacccatacctagtggtaaaagctgtcttaggtatatcttcctctttgattctcaactgataataccctgatcgaagatctatcttggagaaaacagtggcacctttaagctgatcaaacaaatcatcaatcctgggtagtggatacttattcttgatagtcacatcgtttagtgcacgatagtccacacacattctctgagtatggtctttcttttccacaaaaataaccggagctccccatggtgatgaactcggtctgatgtatcctttctgtagcaaatcatctacttgcctcttaacttctgccaactcattggctgccattcgataaggtctcttatggatcggagttgttccaggtaccaaatctattctgaactctatatcccttttaggcggcatacccggtaaatcatctgggaacacatcaggatactcccggactataggaatctcttccaaagttatctggttcagtcttgaccttaaagactcagatgacaatgcatgaacggttacaactcgaccatcatagctggtgagagttacttttttgttggcacagtctatcacacctttatgtctggctaaccagtccatccctaggatgacatcaaggtctttggattctaacaagataagattggccagaaatggtactcccttaatttctattctgaccgaggggctacgttgcaaagagagtgcttgattacttggggtactaaccatcaaaggacgtctaagatcttctacttccatcccatgatttcccgcaaaactcatagataagaatgaatgtgtagcaccagaatcgaaaagtactgttgcagtaactgagttaacaaggaacgtacccaaaaccacatctggagcatcttgagcttctgcagcagcaacatgattgacacgggcctttgatgctggtacagcagagttattctggacagggacaaccttcacgcgtcggggcttcggacacttgtcagcataatgtcctggatctccacagttgaaacacaccacgggcttgctgccttgctccctcttggcaggttgttgctgtgctggagctgcaacaggacgtggagcttgattacggatgttgttgccagcattgttgttgaagaactgacgttgcggacgaacaacagacgaagaacctccctgtggcatggactggggtcctaaggtaagacgcggcttttgattatttccctgttgtgtcttgaattgagcaatccgacgtttcttctgctccatgcgattgtacttgtcctcctgacgaatagccttatccactaatttctggaaatcagggtaatctccaaccataagtgggtaagaaagctcatcattaagtcctcccaaaaacttctcctggcgctcttcatcattgcgcacatcttccggagcataacgagcaagacgattgaactcgtgcagatactccgtaacagagcgagatccctgggtaagcgacctgaactccttcttcttgagagacactactcccgatggtatatgcgtctttcggaaagcagcggtgaattcaagccaagtgataggttcagcagtagtcctgttaaggcggaagtgatcccaccattcagaggcagggccatgcaactgatgtgatgcaaatgagaccttctcctgatcagtacactgaagtaaatccaacttcttctctatggcatgtagccaatcactagcttcaacaggattagtggtactagagaaaacaggcggcctcacacgaagaaattctgctaacttgttctgtggaggtgcatgattattcccttggttttgctgattctgaaattgctgcatcatcatgttcataagctgtgtctgttgagcaagaacttgggccagagtgggattctctccattgttgttattattggggttgttgggaccattcccattgctacgagtgttcaccatctggtatggacaggataagaagagaaaacgggggaaactacttaggacagagaattactttaacttttattgatcttaactgagtttcattattacaaactgaagactctcacaccactaaactcacccacttcctaacactcaaaagcaaacaaacgcatgcacttacatcccaccactgatgtaaatcacatgcgagacccacacacacaaacaaacttaaaacaagcaagctgtcacgaccggaaatcacccaacaggcgttcccgacgtgcgtgtattattccttgtcccaggaggcaaggtacaccaaaagttgatacaatacagagtttaacaagcggaagcgtatataaaattattacatgggcaacgaaggcccagcacactcaaagacaacgaaaaacagcggaagactagggcgacgaccacaggcgcttgacggcaggcacgagctagacaccaaagccttcatcttccaggaactcctcatctgggcttgggaaaattaagcaagactgagtacaaccaccgtactcaacaagacacacccacaaatgcagaataaatgcaagggagtacaagggaattataatataaagggttagggttgcagtaaacagcatttaaagacatttagttgctcaaagctactttgtaaacgcgatcctagaacgctacaaagttattaatcaaggccgtgaacccacacgaacctgccttaacccaaggcctatgatgattcagaccgaactggcaacccgaccctgggtcccagctcgtcctaagccaacccaggccaaccattccacattttagttgttaagcaagttttaagaattaaaacactaacttgggtacattgctcggcttgcccataaccgagggcgcggctattcgaatagattatactctgatcagaggtgtacatctttacccacaagacacatctttctcacgtgcaaccacgtgccacataccaccacggtatacaggcgaaagacgtgacatagtttccaacccatcctagccatagacaagagtaccgacccaatcccgcctacggccggaacccccgggacaggcagacggaactgagcccctcgcagcagggcaccaaccctgtgctttttgacatctcgactaccgggccgcagctcgtgtagccttcatttgccctggagaatgtccatcgacccccgacttcatccatctccaatccgtgtacttttgtttaagactagactgagccacaaactaagccttacccactagacatgtggaagtacggtagtgcgttgcaacagaggcccgaagaccggtccttatacggccgaggtgctaccatcaaaaccatgcaccccgagcccagcctaaaaccattttggggacttttgaatagagggagcggtgtgaagccaattccacaataatccaacaattccaaagtgtccaagtgatatgaatatctcccaaagtctatagttgtaaaaccacctaatgttacctaattaaagcgaagcatctacctaaaatcatactagtgataccacgagtagagtgtccactagttggggttttgtttattctagggtgaacaaggtaataataacaataacaacaataataaggtcataacaaaggtaaataggcaaggctaaataaaacagtgataacgcgggaatttaaataaagcgataatgcaataatttaaatcaacataattttataaactgggattcaatatgatcaagatgatgtgtcttgccttgctcgttttcccaatcgacggcttcgacttccacgaagagcggatcttccgaagctgcagcgtctacacgaccaacggaaaagaaaaaggctttaacactaaataactccacataacagcagaaacaaagcacaaaaatgggttctttacatcttaaggaaaaattagagacttgaacggtccaattccgagttcaaatggccaagatatggccatttgaagtttatatgctctttaaatggatatttgcgaatttcttcatttaattttcaattaaaaatcctatttattgcgtcagccgagggagcagggcgcgcggaccgggtccacgggaagtggggcccacgcgtcagccccacggtccacggtggaccgggcgcacgcggctggcggcggtcggcgccgtgggtcccgcgcgtcagccgcacccgcgggcgcgggcggctgacggccgggcccacttggcagccgcgagggcgcgcccgagggcggcctcgccggcgcggccgacgggagcggcgcgcccgcgccccgatggtcaccgccggcgaccaccggcgcggcggagcggcgcccgagagagaggagggaagggggaaggcgaacggcggtcctcggctcaccccgggacaacgacgacgacgagaacggcggccggagcggaggaagacggcggcgcgggtcgggatgccgagggcgacggcgctccggcagtcgacgggcgaagcggagcggcggacggggtcggcggcaacacggcgaagcggacggaggtgtcgccgagtaaggaggaagtccggagcggcggcggcggcggaacggagctcggcggcgatggcggagagagcggagcacggcgcgagcacgaatccgacggcgagagcgagcggcgagcggcggaaacggaagagcggagctcgggcaacgtttaaatagcgccgggggaaggaaagagcggccggagagggaggaatcggtcgcggagatttcggccgccatagatgcgccggcgatgaatgcgggaaggaaatcggacgaatccgagggagagagagaggggaaaacgggggaaacgggagagggaatcacggggagtgattcccctctctttaatgcgcgcggggacggcgggatgcggcgcaatccgcggcggcggcggcgctagggcacgggcgcggcggcgggcgcggcgggaggaaggcgatgacaggtgggccccacccgtcagcgagagcggcgggcgggcccgcctgtcagcggcgcgcgcgcgcggggaggccgatgggccgcgggggaggagagagagagagggagggagaagtgggccgagccggcccaagagggaaggggggggggaaaaagaacttcttttaggattttctttttttttataaaccttttccactttgtttatttcttttcaattattatttgtgctctgaaaattccactaaaatttgtttaagcattttaggcttttaggaaatatacaaaaatcctccaagcctcatttgacttttacatttgcacattttaattgttggaggctttcacatgaattttaattattctttgcacaatttcgaggatagattttagagtcgatttgggacgcgacacaagctaacacaacgatctaagacaacgacttaacaagtcattctagttcttccgagcataggaggtcgattgaaggctcgttcggctcatcttcctcatctttgatagctacccactcaaacttggaattgttgcgcttgggttcttcttcttcatcactacttatgatgatgaccggaggatttgctggggcaacttctttctccaccacgcggacctttggcgccaattgatagcgagggacaaacaaagctctcttccttgcggtaagacgaatcctagccttctgcggcggtgcttctcccttcaatgcggctaattccttctccaaacgatccaccttgtcttctagcttgcaaatcttaccacgattccgatcttcacgatcttgagctgctaacacagtctccgcacgactttcatccatagcccacaacatctcaaccaaatgtcttgtggtaacatcattctcaattccttcagtctcaaggtaactgccacggtcacttccctggggttggcgaggatgatagcgatactcagtgtcggccaactgatcactgtagcgatcacgaagctctcctatggcaatccttgccacctcctgacatgcatggatgtagtttcttcctccagcttcaaacatcactgaggggatatcttcactattgctgttcaaggtgactttgactcggcacttttcttcatgacgatcatgacgaatctgggcataaaaaggagcattcccaaatccaatgacaaaggacatcgtacgcaactcctggacaaaaccttcaactccaaacaggtactcaggcttgtaacacggcatctaaagacaagtgaaaggagagagttaagacatctatccaattaatagcacaagtttttggattaatttgaataaagtttgaaaatcaaagtaaaaaggtaagtaattaaagtaaaccaagctttgcgaaataaattaaaacagttggaaacgagatcataaattttgtaattttgaataactggtttcaaaagaaatgaaagaaaattataaaatcaacatggtaaatttattttattgcagcaagattaaataaaacaatattgtaaaacttttgctgataaatgagccattagtacagtaatagatgtacagtactaataacactggaataaatttttaatgagaaccaaaaaaaaattatgaagtgcatgtgccattagtttggttaattaaaagagaaagggaggagaacagttctacttttccaatatttttagagggcttctatgggtaaccatttggcataacctagggtcaaagaggctctgataccaacttgtcacgcccggaatttctatccaaaattccaaacgcttacatgtgtgtgaaccctcgtccaggaatcagccgaggcacacaataacaaattgataatagagtacaaatattactctaattaataagcgaatagaatgtcattacagaggtagatagttcctctcaatcaataaagttctaagcagcggaaaataaataaacggcgtagacggctccactccacaggcagcttgaccaaggctacacctaatcctccacaccatcagcctcattgtagaactcttcctctgatgaatgattgcaaggtgagtatatgacatactcagcaagccacgcagcaaatatgcaagtgcacaggataacaaaggatggcataatagggtttcatttgcaaaagcagcatttagcaaacatttgagaatttaacaaaacagttaagtaattaaacaatattaagccaacgctatacaacataccctgttgtataggcccaaccattctgaacaaccaccccggctgcacagttctatctccaaaccaggaatgtaccattccaaaccaggagctaatcaaattattaccagttatagcatcttttataatgatgagaggtgtgagactaatcacgaaagacattgttagacccgcccataaccgcgggcacggctattcgaatagttttactctgatcagaggtgtaccactgtacccacaagacacaaccccacatcatgtcaccatgtgcctcaataccaccacggtatctcggaaaggagttgtgacaatacccctcgcataacacaattcactgcagcgcaccttcctggatcataatcacccccttataaacaaggcatggactccccagcgacccccgtgggcttatctccgccacttctcagtctggtgccccgcaatgaaccatgctatacaaaagataaagccgttgcccatgctggcttgtggttggcacgataaatgtttcacaaccgaaactcgtgaaccggtccttaattgtcatgagcacgaccatcaaaaccatgtgctcacaacccaccattaccaggttttagttggcacaataattaattaactaatcacgattgaccatcgtgaactatcaataagccatcataaaataatagtgaatcattagttatcccataagtgtactaatgtttctaagcagggctaagcaattatatctaatatctagttgaaccaatataaataaagctcaactagtcaaattaatataacccaaggtatcaaggaataaggtaatcaagtacgaaagggccataacaaagaataggtcaattacacccaatgacattcgaaaatagatgcaatagttgaatagaaacaatagctttaaataggatcaacatgctcaaagggttgtttgggatctgtgtgacttgccttgctggccttggaactcttcaaactcttcttccgcgaaaacggactctccggaaacgacggaatctaagcagaaaagagcaaaatcaccaaaacagcacataaacaagcatgaacagtacatgtggatatttttaatgtgtagatctcaattttagaaaaatttagagacttgaaccaactaaatcggagctaagatgaattagttatgaatttttaaagattaaatcggattaaaacacttaaatcggtttaaattgaattatgacgcaataatgaattatttttgaaaaggaaaaggggatttattgcgtcagcgggctagggtttggtggaccggcgcatgggcggcggttcacgctaacggacggccgagattgatccgatccaaatcggacggctgagattgatcgagtccacggcggttcacggcggacggccttgatgacgccagcaatgacgtcaccgacggcggcggcggctcggcgaggcagacggctcgggcggcgcacgctcaccggcgaacggcggcgctacggcacgaacggaggacaccaacgggtagcggacggcacggcgaacacaccgacgaccaaaacgacggcggagaagcaacggacggcgacggcgacgagaaggaagcggcggctacctttgggttgtcgacggcgacgaagctccggcgggttccgacggctgcgaagggacggacgaggacggcggcgacttggcgatgacgacggcggtcttcccgagcggcggcgacagctggagcgacggcggagcacggctgaagcggcggcggcgacggcgaagctagggcacacagcgctagagctactccggcgacgagaggcgaaggcgagggctgcgacgggtagaggagacaccgggggtccttttaaaggggctcggaggcggcggcgaaggcccacggcgacggcaacggcgaaggaaactcgcggcttggaaagagggaaaaccgatccgaatcgaactcgattccaaagctttccaaagcgatttaaccaaagattccaaaggagaaaaggtagaggagatcccggagatcatttcccctctattgattcggccggagaaggaaagaggcggccggatttggaaagcggcggcgacggcagctcggcggcgcgaaactagggtttcggcccgaggaagacgacgactgacgggtgggccccacctgtcagcggccgaacgcgcgcgcgcggctgcggactgggccggctgggccgaggagagagagaagagaggttttgggccgactttcggcccaaagccaaaagaagactttttaaaacctttttcaattaaaattatttcttaaatgcaattccatttattaaaaatactttcttagctcaaataaatcccagaaaaatctaggaattatagaattaagcaaagtatttaatgaaattttatctggcccaattttatattggaatttattaattaaacatagattttcttttcaagacttttaaaattatttctaaaaattccatttaaacaacaatttatatattttgaattttcagggtgtgacaatgtcattcggggccgtgtgaatcatgtgacggccgaggacgtgctgacaactccagacgtcatcgttggtacgttcctcgttcattccatccctgctacaattttgtttgactctggagcttcccactcgtttatatctgtgcgattcgtggggagaaatcagttgggggtagaaaggcttagaaaccctctgctcatcaccacccctggaggggttatgacagcaaagtattatagccctgccgtccctatagaaattcaggggattccttttccctcggatctgattctgctagacaccaagaacttggatgtgattcttgggatgaattggttggcacaattccaaggagtagtggattgcgcgagacgcactgttactctgtaccgagggccagaacaaccggttgttttctttgcacccccaacctctgtcagaagttcagaacttcatcagatagaactgtcagaaattcccatcgtcagagagttcggagacgtgtttccggaagaactacccggtatgccgcctaagcgagagattgagttccgaatagatcttgctccaggaaccactcctctgcacaagcgaccctaccgtatggcagcaaatgaactagccgaagtaaagaaacagctggaagagttgaaagaaaaggggtacatacgtccgagtacttccccatggggtgctcctgtgatttttgtagagaagaaagacaagacgaagaggatgtgcgttgactacagagctctcaatgaagtcaccatcaaaaacaagtaccctcttccccggatcgatgatctgttcgatcagctcaaaggtgccactgtattctccaagattgatctccgttccggatatcaccaattacgtattcgtgaagaagatattccgaagaccgcattcaccacgcgatacgggctgtatgaattcacggtgatgtcgttcggtttgaccaatgcgcctgccttcttcatgaacttaatgaataaagtgttcatggaatacttggataagtttgttgtggttttcattgatgacattctgatatactcacaaccagaggaagaccatcagcaccatctccgtctggtgttgggaaagttgcgggaacatcaattgtatgccaagcttagcaagtgtgagttctggttgtccgaagtcaaattcttagggcacgtgatatctgcaaaaggagttgctgtggatcccgaaacagtgaccgccgtcaccgattggaagcaacccaagacagttacccaagtccgcagtttcttaggtttggcaggatactatcggagattcatcgagaacttctccaaaatcgctcgacccatgacacagttgttgaagaaagaagagaaatttgtgtggagcccgcaatgcgagaaggcgtttcaaactctcaaggaaaagctggtttcctcgccagtgttaatcttgccggatacccgcaaggacttcatggtgtattgtgatgcttcgcgccaaggattggggtgcgtgctcatgcaggatggtcatgtggtagcctatgcctcacgtcagctacgacctcatgaaggcaactaccctacacatgacttggaattagccgcagtagttcatgctctaaaaatctggcggcactatctcattgggaatcgctgtgaaatctataccgaccataagagtctgaaatacatcttcactcagtcggacctgaatcttcggcaaaggagatggttagaactcatcaaggattatgatgtgggaattcactatcatcctggtaaggccaacgtggttgccgacgctctaagtcgaaagagccattgcaacactcttaacgtccgtggcattccacccgaacttaaccaacagatggaagccctgaacctaaacatagttggtcgtggatttttggccgcgttggaagccaagcccaccttgctcgatcaaatccgcgaggctcagaagaatgatccggacatgcatggactcctcaagaatatgaaacagggtaaagccgctggtttcacagaggatgaacacggaaccctatggaatggaaatcgggtatgcgtcccagataacagagaacttaaacagctgatacttcaggaagctcacgaaagtccttattccatccacccgggcagtacaaagatgtacttagacttgaaggagaaatactggtgggttagcatgaagcgggaaattgcagagtttgtggccctgtgtgatgtgtgccagcgtgtcaaggcagagcaccaacgaccggccggacttctccaaccactccaagtacccgaatggaaatgggatgaaattgggatggatttcatcactggacttccaaagacccaaggtggatatgattctatatgggtagttgtggatcgattaaccaaggtagctcgatttattcctgtgaagaccacctatggagggaacaaactagcggagctctacttcgctaggatcgtgagtctccacggcgttcccaagaaaatcgtatctgataggggaagccaattcacctctcacttttggaagaagctccaagaagagttgggtactcgattgaatttcagcaccgcctatcacccgcagacagatggacagaccgagcgtctaaatcaaatcctagaagatatgctccgcgcatgtgtactagatttcgggaagacctgggataagagtctcccctatgccgagttctcctacaataacagctatcaagccagcatacaaatggcaccatatgaagcgttgtacgggcgcaaatgccgaacaccgctcctgtgggaccaagttggggaaagccaagtgttcgggactgatatcctgagagaagctgaagctaaagtcagaatcattcgggataatctaaaggtggcacagtcacggcagaaaagttatgcagataaccgtcgccgtgacctggaattcgcagtggatgattttgtgtatcttcgagtcacgccattgcgaggtgtacacaggtttcagacgaaagggaagcttgcacctcggtatgtgggtcctttccgtatcattgctcgacgcggagaagtcgcttaccagttggagctgcccgcctccttgggcaacgtgcatgatgtgttccatgtgtcgcaactcaagaaatgccttcgagtgccatccgagcaggccgactcagagcaaattgaagttcgcgaagatttgacctacgtggagaggccagtgaaaatcctggacaccatggagcgcaggaccaggaaccgggtaatccgtttttgcaaggtccagtggagcaatcacgccgaagaaaaagctacttgggagcgtgaagacgagctgaaggcagcccatcccgatctcttcgccagttcttccgaatctcggggtcgagattccgtttaaggggggtaggtttgtcacgtcccaaatcgactctaaaatacatcctcgaaattgtgcaaagaataattaaaattcatgtgaaagcctccaacaattaaaatgtgcaaagataaaagtcaaatgaggcttggaggatttttgtatatttcctaaaagcctaaaatgcgtaaataaattttagtggaattttcagagcacaaataataattgaaaagaaataaacaaagttgaaaaggtttataaaaagaaaaatccctaaaagtcttctttccccccccttttccttcttgggccggctcggcccacttctctccctccctctctctctctcctcccctccggcccatcggctcctccccgagcgcgcgccgctgacaggcgggcccgcccgccaccctcgctgacgggtggggcccacctgtcatccccaaccccgcgccgcgcccgccgccgcccgtgccctagcgccgccgccgccgccgattccgccgcatcccgccttccccgcgcgccataaagaggggcgaattactccccgtgattccctctcccgattccccctcttttccctctctctctccctcggattcgtccgatttgaatcccgcaatcgtcgccggcgtcttcaatggagcccgagaactccgcggccggtttcctttctctccggccgccctctctctctcccgtcgctataaaatcaatccccgagctccgctcctccgtttccgccactcgccgctcactctccccgtcggaatcgagcccgcaccgtcgcactttctctccgccgtcgccgccgtgctccggttcgccgccgccgtcgctccggacttcctccccactcggcgtcacctccatcggcttcgccgcgttcccgtcgacctcgtccgcgcctccgtttcgctcgccgaccgccggagcaccgtcgtcctcgtcgtcccgaaccgcgccgccgccttcttccgcttcggccgccgttcccgtcgtcgccgtcgaccggggtgagccgaagaccgctccattcgcttcccccttccctcctctctctcgggtgccgctccgccgcgccggtggtcgccggcggtgaccatcggggcgcgggcgcgtccccctaccttcggccgtgccggcgaggccgccttcgggcgcgccctcgcggctgccaggtgggacccggccgtcagccgcccgagcccgcgggtgcggctgacgcgtgggacccacggcgccgaccgccgccagccgcgtgctcccggtccaccgtggaccgagaggctgacgcgtgggccccactcccgtggacccggtccgcgcgccctctccctcggctgacgcaataaatgagatttttaattaaaatttaaatgaagaaattcgtaaatatccatttaaagagcatataaacttcaaatggccatatcttggccatttgaactcggaattggaccgttcaagtctctaatttttccttaagaagtcaagaacccatttttgtgctttgtttctgctgttatgtggagtttagtagtgtaaaagccttttcttttccgttggtcgtgtagacgctgcagcttcggaagatccgctcttcgtggaagtcgaagccatcggttgggaaagcgagcaaggcaagtcatatcatctttgaacatattgaatcccagtttgtaaaattatgttgatttaaattattgcattatcgctttatttaaattcccgcgttatcactgttttatttagccatgcctatttacctttgttatgaccatattattattgttattgttattattattaccttgttcaccctagagtaaacaaaacctcaactagtggacactctactcgtggtatccctagtttaaatttaggtagatgcttcgcaatttaattaggtaacattaggtggttttataactttagacttgggaaatattcatatcacctggacactatggaattgttggattattgtggaattggcttcacaccgccccctctattcaaaatcccctaaaatggttttaggctgggctcggggtgcatggttttgatggtagcacctcggccatataaggaccggtcttcgggcctctgttgcaaagcactaccgtacttccacatgtctagtgggtaaggcttagtttgtggctcagtctagtcataaacaaaagtacacggattggagatggatgaagtcgggggtcgatggacattctccagggcaaatgaaggctacacgagctgcggcccggtagtcgagatgtcatatggcagagggttggtgccctgctgctaggggctcagtcctgcctgcctgtcccgggggttccggccgtaggcgggattgggtcggtactcttgtctaaggctaggatgggttggaaactatgtcacgtcttccgtccgtataccgtggtggtatgtggcacgtggttacacgtgaggaagatgtgtcttgtgggtaaagatgtacacctctgatcagagtataatctattcgaatagccgagccctcggttatgggcaagccgagcaatgtacccaagttagtgttttaattcttaaaacttgcttaacaactaaaatatggaatggttggcctgggttgacttgggacgagctgggacccagggtcgggttgccagttcggtctgaatcatcataggccttgggttaaggcaggttcgtgtgggttcacggccttgattaataatattgtatagttctaagatcgtgtttacaaaatagccctgagcaactaaatgtctttaaatgctgtttactgcaaccctaaccctttatattataattcccttgtactcccttgcatttattctgcatttgtgggtgtgtcttgttgagtacggtggttgtactcagtcttgctcaatttttcccaagcccagaagaggagctccttgaagatgaaggctttggtgtctagctcgtgcctgccgtcaagcgcctgtggtcgtcgccctagtcttccgctgtttctcgtttgtctctgtgtgtgctgggccttcgctgcccatgtaataagttaactatttacgcttccgcttgttaaactctgatttgtatcaacttttggtgtaccttgcctcctgggacaaggattcatgcacgcacgtaaggaatgcccgttgggttatttccggtcgtgacagccaccaagacctctggcgctgctaccaccggctccgtgtcgtcaaggcggagggcgcggcgagcggcggctgttgctcgccgttcggctgccactccctcgtcagcacctctgacccgggaagatcagcgtggagggccagatgcccgcatcggtatcgagcgccggcgtaatggtcgacgtgctacccacgcaacggagggtgcctcctcgtccggagtgtcacctcaacacggacgcggggatcagccctccgtgcccccggttggtggtgtcggctgtagagcctttgtagcgagccttcggaacgtccgttggcccccaaggttccggcccaccatcgccgaaaaatatgacgggagcgtcaaccccgccgagtttctccaggtctacacgaccgggatcgaggccgccgggggtgatgacagggtcatggcgaatttctttcccatggccctgaagagacaggcgcggggttggctaatgaacttgccacccgcgtcggtccactcttgggaggatttgtgccaacagtttaccatgaactttcaaggcacatatccgcgcccaggtgaagaagcggacttacacgcagtacagcgaagggatgatgagtcacttcgctcatacattcagcggttctgtcaagtccgcaacaccataccatgcatccctgcacacgcggtgatctacgcgttcaggggggtgtgcggcacaaccgcatgctcgaaaagatcgcctccaaggagccccagactaccgcggagctttttcagctcgcggaccgagtggctcgtaaggaggaggcctggacctggaacccctccggttccggtgtggcaacttcggccgcccccgggtccgctgctcagacagggcgacgtgacaggaggaggaagaagaggtcagcccattccgacgacgagggtcatgtcctcactgtcgagggcgcttcgcgggccacccgaaaggggaggcctgcgagcgacaaaaagaaggaggccggcgctcccagcagggagcgcccaaccggcaagtggtgcatcgtccacaacacctccctccacgacctcgcggactgccgcgcagtcaaaagtttggctgagcggacgagaaagtgggaggaggagaggaggcaggagcgccgagagggtaagtccccggcggtaccctccggcaatcggcgaagtgaggccaagcagaaggcccccgtcgaggacatcgatggcggcgatgatgacctaggctttcaggagcctggggccaccattgccactgtcgatgggggagcgtgtgctcacgtttctcgccggagcctcaaggccatgaagcgagagcttctggccgcggcccccactcatgaggcgacgcgtcgggcgcggtggtcggaggttgccctcaccttcgaccagaccgaccacccaccgtgtgttgcccggggaggacagatcgcgatggtggtttcccccaccgtttgcaacgtgaagttggggcgtgtcctcatagacgggggggggggggggggcagccctcaacatcctttcccccgtggcctttgacgccatcaaggccccggggatggtgctctggccgtcccagccgattatcggtgtgacgccggggcacacatggccgttaggtcatatcgacctaccggtcaccttcggtggatccgtcaacttccgcacggagcgggtaaacttcgatgtggcggacctaagtctgccctacaacgcggtcctagggaggcccgcgttggtgaagttcatggcggcggtccattacgcttaccttcagatgaagatgccgggccccggtggccccatctctgtccatggcgacctcaaagtcgcgcttgcttgtatggagcagcgcgcggatcacctcgccgctgcgtccaagcccgagggtggcgacgagaggcttggcacctccgttcccgccgccccgaggcagaggatgatcacatgcgacgaggtcccggtcaaggaggttgccctgggtgacggcccgtccaagactacacgaatcggtggtcttctggatggcaaataggaagacgcgctcgtctccttcctgcgggcaaacgctgacgtcttcgcatggagaccggcggatatgcccggggtccccagggaggtgattgagcaccgtctcgccgtacggccgggcgcaaggccgatccggcagaaagtgcggcggcaggccccggaacgtcaagccttcatccgcgaggaggtggcgcgacttctggaggccggattcatccgcgaggtcatccatccggagtggctggcgaacccggtggtcgttcccaaggcgaatggcaaacttcggatgtgcatcgactacaccgaccttaacaaggcatgtcctaaggacccttaccccctgcctcgcatagatcagattgtcgactccacagcggggtgcgaccttttgtgttttctagatgcatactctggttaccatcagattcgcatggctagggaggatgaggaaaaaactacattcattacccccataggaacttattgttatacgacaatgcccttcgggttaaagaatgcaggtcctacttttcaacgtactactcgaatttctttgggtagccaaataggacgtaatgttgaggcttatgtcgatgacttggttgtgaagacgcgcgaccaagaaactttactttcagatctggcggaaactttcgagagtctccgctccgcccgcataaagctgaaccctgataagtgcgtgttcggtgtacctgcgggcaagcttctcgggttcttggtctctgcccgaggcatcgaggccaaccccgagaagatacgagctatagagcggatgcgcccccagcaagcttagggatgtgcaatgcgtcaccggttgcatggccgccctaagtcggttcatatcgaggctgggagagaaggcgctacccttatttaagctcctcaaacgctccgggccgttcacttggacggaggaagctgaacgtgccctcactcagttgaaggcgtatctcagctctcccccagttttgatcgccccggagccagatgaacccttgctactctacttagcggcgaccccgcaagtagttagtgcggcgttggttgtggagcgcgatgaggacaatcctcattccgcgcatccccaccctgtgctggcttggcccgggagagagcagggaggagaggcccccgagccgaacggtggcccaaggcccccgacgaccggagctggccctctgcccgcttgtcagacggtgccaggtgcccccgacccccaggatggcccgggggccactgcgggaaggccgcacctatcgccctctgaccccgaggttaaccctgtgccgactcgacccgggagagagcagggagaagaggcccccgagccgaacggtggcctaaggcccccgacgaccggagttggccctttgcccgcttgtccgacgatgccaggagcccccgacccccaggacggcaccgaggccactgtgggaaggccgcgcctgtcgtcctccgaccccgaggtcgtcggcacagaagacgagtgcgccccgcgaggccgcttggacgaagagcgccccagggatgcggcccctggcgaagaggatcggccccaccgaaaggtgcagcggcccgtctactttgttagtgaggccctccgggacgccaagacccgataccctcaggcccagaagatgctttatgctattctgatggcttcgaggaaactgcgccattatttccaggcgcatcgggtcacggtggttacgtcttaccccctcggccaaatcttgcataatcgagagggtacaggacgggtggtgaaatgggcaattgaactttctgagttcgatttgcactttgaaccacgtcacgctatcaagagccaggctctcgccgattttgtggcagagtggaccccggctcccgaacccgtctcactccccgaggccagctcgggcccctcgcagctgcctcacaccgcccgctaggtgatgcaatttgacggctccctgtctcttcagggcgccggtgcgggggtcacgttgacctcgccgagcggagaaatcctcagatacctggttcgcctcgattttcgggcgaccaataatatggcagagtacgagggactccttgcgggacttagggtggcagctggactggggatccgccgcctcctggtgttaaccaggtctgtatggagtaccggtgctctgacccgcagatggatgcttacgtacgccaagtacggcgtatggagcgccatttcgacgggatagagcttcggcacgtgcccagacgggataacacgattgccgacgaactctcacggctcgcttcctcgcgagcccagaccccaccgggcgcctttgaagaaaggcttgcccagccgtcggcgcgacccgaccccttaggggagacggacgcgcctgaccggcccccgaggcccgtcggagtccaggcctcgggacccgaggggagtgctcccagctcccttagattgattgcttggatcgctgagatccaagcatacctcacagataagactctacccgaggaccgcgaagggagtgaacgcgtccagcgcatctccaaacgctacgtgctggtagaagggaccctctatcggcgcgcggctaacggaatcctcctgaagtgcattcctcgggaacaaggcgtcgagcttcttgccgatatccatgaaggcgaatgcggagcccactccgcctcgcgcaccttggttggcaaagcctttcgtcaaggtttctattggccgacagctctcaatgatgcggtcgacctggtccggcgatgcagagcgtgtcaattccacgccaagcaaatccatcagccggcccaggccctgcagatcataccactttcatggccatttgctgtctgggggctcgatatcctgggaccgtttaggcaggccccgggcgggtttgagtatctgtatgtcgcgatcgacaagttcactaagtggcccgaggcttatccggtcgtcaagatcgataagcactccgcacttaagttcattaagggcattacagcccggtttggggtgcctaaccgtattattacggataatggcacccaattcactagtgaacttttcggcgatcactgcgaagacatgggcatcaagctctgcttcgcctcccccgcccaccccagaagcaatggccaagtggagcgcgccaatgcggaaatcctcagaggccttaaaaccaagaccttcaacatcctcaagaagcacggcgattcgtggatcgaggagttgccagcggtgctctgggcgaaccgaaccacaccaagccgagcaaccggggaaacgcctttcttcctcgtctacggcgcggaagcggttctcccatccgagctcaccctgaggtcccctcgggccaccatgtactgcgaggctgatcaagatcagcttcgcagagatgacctcgactacttggaggagcgaaggcggcgcgcggccctccgagccgcgcgctaccagcagagcctacggcgctaccatcagcgccgcatccgggcccgatcactctgcgtcaacgacctcgtcctacgccgcgtccaaacgcgtgctggattgagcaagctctcaccaatgtgggagggtccgtatcgagtgatcagcgtcccccggccgggctccgttcggctggccgcgggcgacggcacagagctgcctaacccgtggaacatcgaacaccttcgtcgcttctacccctaatagggttcgggtgtcaggtttcgggctcgggccaaccccgtacccccctcgggcgtgcagggttggccgggggctaccacacatgcatattcttatttctcttctatctgtatttcaataaaagcattttcgatttcctaaaggctgtgtctgtgctgttgtttccttttgaagaatcttgacttgaaataggtcactcgtgctcgatcctgccctcgggggctcgagtcggctaaaatcgccaaaaggggcccagaaccgagccgtgccccggggcgtggttaactccgggggggaatcggcaaaaacccacaaccgggtcacccataaccctcggtcaccacgctcccggcctggccagtctcgacacgtggatctccccaggcactagccccgacccgagccatttgaggactgggacctgggcacgagcccttgttcgagctaagacacaaaagaaccatggcacagatcatcctcgttctcatacacacagtaaaatgaaattgacacagaaatttctttattttgattgcagagtaagttaatctatacaaaaaggaggcccgaaggcttcggaagaaagaaaagaagaaaaaactatttaaagattggcggggacctggaggctcactccgatgcacccgagtcgccagcctcgtcgccactgtcgcccacaccgccgtcatcgccctcctcgtcggagctgagggcgaacgcgagccgaggggccgaaccctcgaagctgtgaacgatatggttggcggcgtcctggacccgcgcgcgcgcgccgtcctcagtcccgggagggaactcgtccagcgccatccatggggagaagtcggggtccctggcctggtaactcgccagtacgagctccaccgctcctcgggcgaggtccctcgaggatgacttaatcgtcctctcgagctcctcggggagccgttggagagtcccggccatctccgagaggcgctgggcgaggcccccctggttggcggcgtacttcgcagtccgcccgccccagagacccgcctgccgcccggcgcggtctaaacgggacacggcgtcgcgaagcatgctgggccctatctcgcctgccagacgaagggcctcgacctccccggtggacgaattcagcgcgccctgcagatccgcgatggtgtgttcggcagctgcgaggcgggcggctaagtcgctgtcgcccgtggccgccccaccgctacgcgcccttgcatccagctcccttgcctgcgcctcgagttcagcggcccgttggttcagtgcggccctctcggcgcgggcaccttccagattgcgacgcgcttgttcctcttgcgcagcttcgcggagggacgcgctctccgccagcctttgcgctgcggcctcggcctcctcgagggctcgctcccgctcggtgagcgcatcctcgcggaggcggagtgcggactcttcttcggcacaggcggcttcgtgcgccgccagtgtgacctcccgaatggcaacggcggcctcgcggtccgccaggtccctctccacgacgcaggcacgctcttccagcgccatggcacgggcctcaagggcttcttcgcgccgccgggatgccacctcggtctccgccgcccgccgttctcgggcagcggcagcgtcaaggaccccctgggcggcgtcgagcttcttccctagctccgcctcccagctcccgtattgaaggcggaggtcgtcctgcgcctcgttcatcacggtagtggcgatgagggcagccccccgctcctcctccacctccctggcgatctcctccagcaccttccgacgggcttcgagctctgaggcatgccggcggtgtgccttgcggctcacctccaccatggcctccaccgagtgtcgcccctcttcgacgcgcgcccatgcggcgtcgagctccgcccgctctgcttgcagggcctccatctgggcacttaacccgtccaacaccgtggtgtttgcgacggccaaggcctgcagaaggggctctgcgctcaatggggcaacggaaggcgtgggggagagccgcctcggtgaggatgccgcgcggcccggcccgccgatggacgtgccgggctcggggacgtcccccggacctggcttgtcctgagtgttgcccgagggagtgggcccaagcgatgtgcccgcggcctcgtcgcgagctgcctcggaagttgtcgccgcctcggcttggcgaagtctggcttcctcccaagcggcttcttcagcctggcgagcccggacggcctcccgggcggcctcctcggcttcccgtaggcgatccgcggcttctcgccggtcagattctcgcctccgggcctccgcggtcgccgtatcctcggcctcagactggccggacttggaatggcgggagggacgcgacgagatctcgctgaaacagaagaaagaccagaagacaaacaagatgggtgagtgaaaactcgcgttgggagaatgaatacagccacaatgggcgtgggacgaacctgcgagggggtcggttaaacgactaccttggaggggaaataaggtttccccgggatggttctgtcccccccatcttgcgaagccgtatcttcttccgctccccctcgggctgcggcgtcggcgcggccccctccgggcgcctgctgctgacacgcgccgccccgccccctcggggaggagatggggaggaggaaccctcttgcttcctcttccctcgggcgtcggcagggcggcagccccccgagcccccgtcacggagcccggaagcacgaccccctcctggggtagattgttctcccctgcagctcccgcccgcgccatcatggcctcgaggagcctgctcctctgaggccccgaccgccttcatgatggtcaggatggtggcgcgatctggatcgctgcagagggggaggactccttgggggatgagcgatgcctccgcggagctgagattcagcacccgttggatcattaccttgaagtcttcagggacccagtcccatttgaccccccggtgggtcctcatacagtcctcggacccggtgtactcccaggcaccccgggcgcgccgctggagtggtgcgatccggcgacgaaggtagtcgccgtacaccatggcccctgtgagcccctgggatcgcaggcccgccaggcggtcgaggacggcgtcgtagccatctcccagatctaccggcgcccgccagctggaggcctgcgccgggggctggttcggaagtcggaggcgcgcttcgtcggcgaggggggtgtagaaccagtcgctcttccagtcatcccacttcttgcggaggacgcagggaatctagcggttcagcaccggcccccgcggctggaagtagcagccaccaaccaccgacggcggcgacaccggctgtacggtgaagaaccaccggaacaaccgaagggatgggcgcaccccgatgaacatctcgcacaagtgcgcgaagatggccaatgtcattaccgcgttgggggtgaggtgcgccatctggagatcgtaaaactccagaacatccatgaagaaagaagaaaatagcggaaccagccctgccattgcgaaagggaggaagaaaacggtccgccccgggtagcgtggcgccgggcgtccctcgcccagcgtaactatctcctggccggtggcagattccggcaggaagcggcgcggcagcccggcctgcctctcgctcacgatgcgggaaagcggcagcacgctaccatcgagtggagcagagccccgtgccatgacgccggaagaagagatgtttgagagcgagcgcgtgtggcgagggtagggcacaggaaacaaggagttagggcacaagcggcgaagacaaggggaataatggcgagaggaaggaagcaaatctcttcctcggtgtctttatacccttgccaacgctgtgcccggctcctcgcttctcgcgcccactatctcgctccctcgtttctcgcgcccacgcttccactaatcccattcgcccgcttgcggcgcatgaggtgaatatgcggctgtggcagtcgagatggaacatatcgtgcgcgcgttaattgcactcgccgaccgaagtgccatcaccatatctccaggcaaaacgaaccggctcgtcccgattcgtgtgctactcgagtaatgtggcagtcttgaagaggccgctcattattgacagtcgagttaccattgccgatgtgcgtgatttgcgaccgttgggtttctgcccaactgtagagaccagccccacttgtcaccaggcctaagtaaggggcgtcacgcccgaccgcttccctcgaggagggtgatcgccctggcataacgccgggggctactgtcggtgacatgggaccgggagtatcatgactagaggcttgggcaggagcaatcacccacgtggcctgaccccctcgggggggtcgggcccgaaggtgatgagaccgcccctctctttgtctccccgagggatcggaccgctcccgtttcggccccgagggccgaggcgccccgaccccttgtgggttttgcgccgcgtgtataggttaggtgagcacggcggggctcacctaaccgcatttattgcggtttgaacgagcgcgtcacgccgcatgtaacgcagtgcagcgcgctcgtttatccggtctgtgaccggtcacagaccggtcagatcgtgggttaggtggcaacaggcggtctgacacacgcctcgccccatcccgtcaggataagagcctccaggcacttgtccctagccggagccagcgtgctagctcctggagatgacacgttggtcccggtcagatatatgccaggcttcatcccaaccgttacaagcaagacattgtatgaagaagggtgaacatgcagattgataaactgacgcgtggtggacaagaatgaccgatttgtgaccggtctgacactggtcatgtcgtcggcagacagccatgttcccacgtcgcacctgcttccggcgaaagtagaggtaggtatgggccgtcccatcagaaggtcattcggacggcaaccattacaaatctccgcccatttatgaaggaaaggcgagccaagttttagtgaaaagaggatgggtccccaccaaaaagagaaataggtagaagtggtgcatgtggtatccccttgagatataaaaggaggaccttgcccacttagggaggggatccggaccagaggaccaggggaggagagattggagactcccggaggatccaggagaagatcccacgagaggcaaaaaggaggaaaggggtttctagagtttgagctctctggttctccagctctttgtagcttcttcgtacacagatctaccagaacacaggagtagggtattacgcttctcagcggcccgaacctgtatacatcacccgtgtcttgtgtgtttccactttcgcgaacattccacagactaggagcttagaacctcacccagggcccccggccgaaccggcaaagggggacctgcgcggtctcccggtgaggagccccacgctccgtcacatgatgtcaataatatgaaatcgaaatgtttcttggttgtaatgaaagcgttcgaaagttcgagcttgttttcgaatcttatagagaatcatgcactcatgcttcgtatttggcagttggttatactcgctccttccgcttttgatgcataattcgactactgagaaaagttagttaattgctgtatcgaggaaaagaagcaagttagttttatagcaggtacaatagcatactataagagtaagtttaatagtatagtccactactagctccaattcatccatagccaatctaatagctcattcatacaatagttgcttactatactattaatatatggccccagtcatacacacactgtgttttggagtccgtgctgcagctggctacagatctgtagcccgctgctattctttttcattttttatctcataaaaatatgtttatagctaactaatggtatgctattgtacctgctctaagccagctatagacatattttaaaaagataaaagaggatagagaagtgcagtgggctacagatttatagtcagctgtagtacggactccaagaggcaatgtgagtatgacatgtgggaccagatattaatagtgtggtatatgtttctagttaactattgtatgaattactattactccatccttcccaaattgatcatcatgtaaaagaatctaaaaattcttaaattgatcatcatataactgcatggacacggatttcagcagaatacagttaatacagcatggaagaatgtgtgcatgctatggtgtaagtggcatgaggttttaatcgatgcatggtgggagaatgtgtgtatgttgtattgattgatgtgatttaaattatccttggttttggtgtataaaatcaatttgggaaggaaggagtagattgactatagatgatttagagctagtagttggctatactattaaacttgctcttagcagctccaattctatccttataaaaaaacttagaaataataggagtaatatactactggtatcatgaataaaagtacaattgacattcgacattcttaattccttcaattatttttttggtatctcaaacacatcttctctaacaaaagttcatttgcaaattttgatattctcaaacataccccaaaattttatcttagccaacggcagtcaagccgggtaaaactgttatttctcctccaaacaaaaccccctaattactcttgctccaaaacctccccttctcaagcgctctctcttaggttcgtcgtgtgtttcccttcaccctcccatggcgagcaacccaagcagctccgcggcgagggctgcgggctcccagggcggcggccatggtggcgcgcgcctcgaagacctagcactggacaaggtggcggaggcggccgacgcggtcgccgccgcgtcgagcgccggcgaggtcgtccgcgcgatccacgccgtcgccgccctcgtcttccccgtcgactccgctgccgtagccggtgaggctccgaatcctaatccgacatgctccctattcccatttatctcattcgccgtcacttggggtgtctgatggcctctcttgtaggtaccgtggacgaacccttcaggagccaggtgaagctctgtgctaattttaggccttttatttcgtccatctgagaaaaattactagtagttttatcatttgctatttttggttctggcataaacaatgatgtgtgatttctaataatcatggaaggggtctgtgataaaaaaaatggggaagtcttgagtttttgttttgacctgcaatcacaaaggactgtatgccgaaatggagcagtaattctgccacaaaaaatagaaatggagcattaagatatcatagtgaactattggttatgtggacaatgtttcagccgctgtaatgtcataattgtggtgcatatatttgaggaaattgatctctggaaggaattactctgaaactggattgataagcatccacagaattttccagttgataaacctataactttggtcacacaatgggtaatcgaattgcaggaccttgctaggtgagctgtagcagcacacattttgtaaaacctgtgtcatttgataatgcattcagaatacagaagatcatgtttcatgcttgagagataaattagtatggatattcaaagacacatgcttccttcaatatgattcagccaaatagccaattggagttccatccttttaggccatgatgtaacagggagaattattttctgtactttcagataattaatggcgtaagcctcagcaatgatgaacggggatcttggaggcatgctttttaccatggtccagcatttcctactatatctaagattttgcttggccgtaagtttactcttgaatctatcactgcatatatactttgtaccattgatattctttacatgtacaactctcctgtttgcttataatgttatctgccagtcatacaagtcatacttcatttgtattgtttatcgatctctacaatttgattactatacactcaaaacttcttgattgttcatcacagttaggtcagttgcaaagttccttcagttataatcccattctcacactttggttgtccagatgttgccttgaagtggttacgtcagatccgtgcctctgcaaggaaggaaatatatgattcgttttttgtcaaaggacctccaactgaagtcattcaagctcttgttcctgctttgtctcacaaaggaggctctaaggaagatcataacattatgtgttcaaatattgaaaggttattcatgaacaatctatcaattctattaagtttacacctgaatcttttattggtccaactttgtttgcttttactataagtctatagcacatccttctttttgacaattccctgtgagttcaaaacttcaaatattacacccaaaccttgtaggacaaaatttcaagtttcaacacttcgactacatgggtctgtactaatatcatgtatttgtccaatcgtctgctttgtattcttaagtctattttatgctcgagtcattaggaaatcaaacaatctagcatgcacacttcatctgaaaattcatgggtctgttcctatctggtatcttccttttttctcacccgataactatgttttgagcttggtgtgtcattatttccccccatttcaggctgttaattctatgtttggtcgagaataagggggtcagccagattattgcagagtttactgtaagcagcaagcacgatgatgacaacttgaacccaggcagagcagctttcatttcaagggttgctcaactacttgcatctgttccagataaaacaagaatgggagcttcacctgcactgacatcatcgtatcctcacccccaccgccccaaacacgacacacacaaacacaaacatctttgttatttttttcctttccttttattctgttagctttttctcagctaatatgtatttatttgcactatgtttgttcctccaaactgtaagtccttgatggaaaccaaggtcattcttcaagtgtgttgtcgatcagcttcttgttgcaactgaacaagcggctatggagttggctgctggcgaagatgctaatggactagatgcctccaattctgtgttcctcttcgtgggtgaagtgatatctcgtgttagccgtcgtggatctactggtgagtattcatccttcaggatgtagcttgacgtgtgcagtgtgctgttagtttatctgtttagacatttctatttactaatgggggcagttctagttggtgcagtaatggtttagcaatgcatttgtgtctggtaggattatagtgtattcaactcaacatttatgtttgcgatggtctgctactagggtgatggagcagatccttttttgtcctcatataatctttaatccttatgcaaactaatacaacacagtggtacacatttggttttctctgatggtccactaatagtcccttcagctgaaattttaaacatttaaggtagcctgtttttgggtttttatccagtgttcacttttggcaatcacagtagacttggggtctgcaatgcttgagatgtcacccaggatagcagtgcctcatgtcatggctgatcatcctagcacactgttctagtcattaacaacttcttgtttgtaatctatgtagccatccttttccctactatttgttgtatttctgataatatatcttgctcttttcaggcattttagttgctgagctgattcctaggatccgtagtcacttaaagagatgtatggaatctgatcataaaaccataagtcctgacaagatcaagcatgtttcccaattttggtttaatgtggttgaggctattagagaccagcattctgttgaaaggttggcggaagagatgttgcgccaacttgcatcacaacatacaagcgatgaggaggcatactggattctgtggactttgtttaatcagagcttcatgcacaaaactgtttttgaggtgagaatgagatagtacatgtgcgcattttaatactatgcaacacttgacgtgcttgttttttagtttatccacattggttcatctgtgtctggcatgctacatttatctgtgaaggaaaaagtacttctgaggtttatttttttcagttagtggatgttttaggtaaggtgaatgatagtcttcagataccctgtatgtctttgttacttcattcctatgaacgacaaacagggtgccatgtatgtttacttaactttcagcatgggcttatattatgggtgtctattcagcgtataattggcatgcagcgattgatcaaataatcttcaacgtgtcttttcttttcttttctttcatcctttaattctctgtgctttcttcagggcaatgtttgttgacaaatttttgcgttggaaaacattccctctatgttgtctgagatggattcttcactatgctgtctttgaattgccaccaaattcaggcatagaaacacagaagcaaaggacatcgagcttccttggtacactgcaaactttagtcagtgtttggtccaagaaagagtttgtccaggcatactcagtggagcaacaagcttgtatcctttgaggcactcaaaactgtattacattacacactttttatttgcaaattatcatttgacttgttccccttaaacaacactcagacatcactgcagcaattgggttgtgtttggagaagatgtcaaaaagagaattagaaacaactaaagatgtattgaacaatattcttgaaggtgtaagctgtgagtatcccccccccaccccccctgcattagcttatcatattattattatggtaatactgaatgctcttttgctgtaggtaggttagagagtccaattgatttaatccggaagatggccagtgctattgcattgacattttctaaagttgttgatccaaacaatcctctataccttgatgataactgttgtgagaatgttgagtgggactttggggttttatctccgaaggaaatcacagccccttcaaaggatgtagaacttataagcaaactgaaaccatctttgcctgagaacaagaaacatgcttgtgagagaagggcaaaggctattaaacatgatacttcagagaacagggcaaaaatcattgagatcaaatcactagattcttgtgaaacgtctggttctgctgtgaatgggcatttcgaagaggaagaatgtgatgaggaaataatgaacattgatgcctccagtgattcatccctggagccatatgatctgtcagacgatgactcagatttgcagaagaaattcacccaattaaaagatcttgctgctgcactacgaaaacctgatgatccagacggtgtaagtttctatctagtgctacctgtactttccagagcaaattattgtaaaatcctgatcatcctcccttcttttttacccaaggttgaaaacgctctgagttctgccgaaaagcttgtgagagcatcacctgatgaactacgccacaactcaggtgatcttgttagagcacttgtgcatgttcgatgttctgacgtggcaatggaaggagaggaagattctgctgaagaaaagagacagaaggcattagttgccttgctggtaacctgcacatttgaatcattagatgttctcaccaagttgctgtactcatcaagcgtggatgtaagtcagcgcattttgattattgatgttatgactgaggctgcacaggagcttgcggaaactaaaattgtaaggagagagctgcggcatggaaacttgatatccgacacctctccctcttggctagttcctagtgatcagggacctgctggtgcaggtccttggagggaagtctcagaatcaggaacacttctgaattggtcacaccggtatgaaagagaagttccatctagatctggtcaagttaaatcaggaaaatctcgtaaatggggtcttggaaaagctaaagatttgcagacagagtggtcaaaaaacagatttcctttatatgctgctgcttttatgctccctgttatgcaaggatatgataaaagatcacatggtgttgacttgctcaatcgggactttgttgtcctaggtaaattgatatacatgcttggtgtctgtatgaagtgcatggcaatgcatccagaagcatcagctgttgccccagctcttcttgatatgatcagatctaggtctgccaagcctaaaacaagcatttccgtgttaaagactttcttagttataaccaagtggtacgattttgacattggattttgtttctgcagggctgtttcgcaacatcccgaagcatacgtcaggaggtctgtgttgtttgcagcttcttgcatactgatagcgctgcatccgtcgtatgttgcatcatctcttatagaaggaaatcaggatgtttctactggtttggaatggatacgcacatgggctcttcatgttgcagaaacagatcctgatacagaatgctcatcagtaagtactctggtctatatctgttatcgatcacttgttcgtgttttgttcgtcgacgtagagagcaattatggtataataggatgacatttgtttcttaaaaccacacacaataataataggtcattttttgacgaacaaaggagtacagttatgctggttttgtatcaaagtttgtctgcatcgcctaatcatttcagtaacctacccttatatgctttagttttctgtaacctactcatttctctcattccttcagtatacaaattcagtgacccagctcttttcagcaatttgtaacgaaaaacaggacatatttttacttataagctggaaaccagtttttacttaaaagagaaaccaattcagtataagctggaaactcagtaacttttcacactgtcatctaactcctcccattggcatgtttgtcttcaagatggctatgacctgcctgcggcttcattctgagatggcccttcagacatcacgagcactggaatcggcggatcacagcaaggccagcagcagcagcagcaggtcgctaccttctaagcttgataacatcatcataccatttgccaacatgatgtgatcgatgtactagattaagttgtaaataagcatatattatcttgccatgtaatattagaaattccaggtcagctaattctgattaggcttgatattgtcatattacagggttttttaatctgggatttgaaaatgctagaatttttgtcgattcgtgtggagattgtatggaagttgtcctgatccagattaaagagaattgatgaaaattgtacccagattgatgaactgactaatagttgatgatgatgagtaaaagagaattggacgagtcatgcaggggcgagggatccgtggggaccaccagccacaggatggggccactcctcgagcgttggatcagccgcgagggacgatccgacggaggagatgcgtctggtccaggtatttaagcgcaacttttttttgcccttcgcagcacaactgcacaaccacttttccgcatctctctctctctcgcgtctcaagagcagcggcgaaaggtgggaggtgagatctctctctcacttcatcctcctctcctcttctgtggtttcgtccgccgcctccatccctaaaccctacttcttctccgaaagcgccgtgagattcttctccctactcttcttcgatcttgctccattggtggtggtgtttgtttgcttggagtgtttggtgtcgcggtttctctcgttcttgtcttcgctgaatcgagcagcaccctgcgtcttggttggttcctgtttaccgcggtctggtcctcttttttcgtgttcttcgcttcccgtacccgtgatgttgttgcttgatgcatttgaggcgtggttttctcggagttggatgaggaggtcgacgagcaccgaagcttcatggttggtctccgttcgcctctctcccatcggagcacgttgatcttgacggttcctggcgcgaccaatgcgtgcgcgagaagttagacgccatgaattcgtttctcttctctgctttgttttttttttggctcctgttttgcagttggtgtgttgcggaggtgtcagtttctgaatttgtataaaccaaatgccctcttcttattctttttgctgttcctgatgcaatctgcccgtcttccttacgtcttgatcaagtagaacggcgcctctttctcttctcgaattttaaggcgtttcggaatccgaaatttgctaagattttacctggccgtgatcatttttttcctcctgttcttggcttcccttacccgtgttgttgttgcttgatgcttttgaagttgggtgtgtgagtttcttggaggaggttgaagagcacggaagcttcatggtgatctcgttcgcctctcctcggaacatgttagtcttgatcttgccttccgtttctctatttggtcttgatcttgccttccgtttctctatttctaccagtgcaagctcgagaaattaaaccacatcaattcgtttctcttttcagtttgttctgttttggtatgctgcggaagtgccagtttctgaatttgtattagctagatgccttcttctgttcttttcgctgctcctgatgcaatatgcaggatgcttcttctctacacgtctctctgttttctgcctcgaaagaactctctgtcctattgtggctttgtttactcgatgctattttttcgttcaatgatttctgcatgtgtcgctccattgaattacttgtaaatcttctgattctttacctatcaaagaaacttccatctcttgaatcttgatttggcttccttctcccttaccgagatattgtgcattttttgtctgtaacctgtttttcacttctctgtgatggtgttcggtgccgtactgtactgttaggttgttcttgctttttttcttctgttcttcattctttgtttgcaattgtttaagttttgattcgccgaagcagtgccatatctaaaggaaatcgatcattcttgtacagtacactttatgcgctcgtttcctcttcttatctcactttgaaatttggtgttatgatatgtgtcagtaaagcttatatcgcgtttgtagaaaaccttgtgtgtattttgttcgcagtaataaaataagatttaggtgtaaaataatgcagcactgcaactgaagattgatacttccatgttatatatctcaaaaatgcatttaagcatttaagggccctgaatgaaagcaccaattacaccctgtgctttgagctagataagtagtgccatatcaagtttgatgattctacttcactttatttcatatgtaacctagctttctggcatttaattgatctgtattattgtttaagtgtctttccccgtttttgttaataatgttattttatatttgtattcatgttaaattttcagcaaagcaagttccgctatgggtaacagccttcctgtagaatcgaagttcacttttgaagaagagaatgacagaattaagtatgttgtgtcgtctatgcaaggatggggtgagaaaatggaagatgctgtgagtaaacttgcagccttttgtatgacaaaaaaagggacagttctgcaaaattttcttactgatctttaagtaattgtgtaaaatactgtgattgacatatgccctctatattctctagcatgcagctattctaaatcttgatgataccacgtccacgtctttctttggtgtttatgatggccatggaggtttgcttcattctcatttttttttttaatttcaaaccctccaaattgttggcgtaactgtttgtcatgctatgtttgtctgtgtgtatcactttgtttatctctgcgcatgttttgaaaactttgttgtatatgttgaaacatttacctgtcaattttcaaataaatatgatgctacagttatggataatgaacaagttagctaatcagtaatcacattcgtgtggcatgcttgcaaggataacatgaactacataaaaagaaattttaattcatgagagataaaacactgcatgaatgagttactagtaatataaatggtgatgataatttagaggataattacagattaacaggttagttttttttttaatgatgcctattcaagtgttgttctgctactaatgttcacaacagtgttttgatttataagcttctatgcaatagaagtaatcttgatccatcgtattgagcgagacgccatactgaattgtttttttctatctcaggagctgaagtagcattgtattgcgcaaaacaatttcacattgagctatgcaatcatgaagactatcacaacgatctgattaatgcactggacaatgtgtttttaaggttattttggcctactttacataattttgtttatagctgcacttggaaatgtgggatatcattgttcgtgtgattgctgcagcatggatgagaacctgcaacagtccgatgcttggagagagttagttattcctcatgataatggatgtatgtattttctcaaggctggtgtctgtgctaagcctttcccacaggtagtaatcttttaacccctagcatcctcaaatattcatgtcgtgaagaagttactcaaaattgtatttgttggacagtgtgcatattgtatctatgaaaaaggaaatggaagaatgtgtttgatatcgagactgttgttctttcttgtgttgtactttggagttggaggagatatgtttaaccctaatctcgactaattgctcctattaaaaatggttcaattagttacatatcaattggctggtttactgagttggaggccaacaggttcttaagttctcattgcaccttggttcttatcatactatgctatccaaattgaggtattgtttgcgatatcccttcgatggttatttctttcatacattggtttggttttcagaaatgtttttctatacctgttggctttcttgagctattttttggtagtcttttccttctaacaatgttgtgattctgtgttatatacttcagtttggttgttgttttcccaggcgacatatactgggccagcgtatgaagggagcacagcatgtgtggttgtcatcagaggtaaccaaatgattgttggacatgttggtgattctcgttgcgtactctcaagacagggtggcctggtatagtgattgtttccctattgaatttctggttaatacctaatttgcaagctcgttcattgtggcgcctaacatttgtgcttgtttccattttgtcaataggctattgatttatccttcgatcacaaaccatgcacaagaactgagtctgaaagagagagagttcaaaatgcaggagggagatctcttggacttaggtgtgaacaagtaatggggaattatgtagtcaaggaacaatgggtcctcggtgattttgggggaggtgtaacaatctcaagatcaattggtatagtcttgtctggatctgtttttcattgattgcatgtaatagcacaaaaagaagcacattacactgtgattggcgttttacctacttacatttcaggtgactttgctttcaagaagaacaaagatttagatcgtgaaaaacaaatgctggtatgtgatccggacatcctcgctgtaagtgtaactaagtgtaaataggtccgtttggtagaatatgaagttcagttttgccgggttgggatctgatggaaaattgccctttcaatgtcaggatgacataactgatgacatggagtttcttgttattgcaagtcaaggtctctggtaagtggtaactcttcagcaaaaaatacctgtcaataactattggatcatttttatgtcaccagtactcattggcattctcttttttttttttcctcctatttggttcatatatagtttcactcatagttccatactaattgcattgactactgtatattttccccctgcaggtcttgcgtggacagtgcggacgtggtttcttacatacatgaccgtttatcggtggtgagtcttttctttccctcagtttgtcttcttggcaggacaagatatcttagtggtgttaatcatgctatctgttctaggaaatgacttcaatcaagcaatgtaaatatcctgattttctcttttcttttaaaaaaaaactgtgtaagccctaaacctcacaaaaccatttgttagtttagcactgaatatgcatgcctggctgacaaactgccatctgctttgacttcgattctttcgctgttaaaactgctgttaccaataatgctgtgaccaattaatattgctatgcaggagggtgcagagctgcgtgtcatctgtgaggaggttgttgagttcggcttggcatcgggcgagaacactaccgtcatcctggttcagttcaagcccggcgccttccagtaccagctggtggatcccgctggatttggcactgccgtctctaacattgccagcaccagtgctgcgccggctggtgccagcgacacaagcgacgagggcgtcgatgacgctgccactgccaggcccaccgttatgggctacgacgcggactccagcaccggcagcgccgatgccacggtcgacagcgacgaggtcgatcccaacgccacggctgacagctacaatcccagggggcacgctgagatcgttgccagccacaccgacgacgaggtctacaccagcggcagtgccagggttgagagcggcgagctcgccgtccccactcccagcgccaacaacaccgtcgcggatgaggtcaaggtcgacgccgctgtcgtcgccggcggcagtaccaccgccatggctgctgacgaagccaccgtggtgtcgttgttgtcgaccatcgtggataactactactccattaacaccagcgaggagccagcgaggaggttgatcccactgccactgtcgcagccgacgacaaggtcaccaacggcagcaccagcgccacggccggcagcaagctgcacaccagcgattcttcactcaattttgtcctggtcgaagatgatgtgtgatgatgcgtgcaccgctgcatgcgcaggatgatactgatcctaggtagcactagtatcgtagtagtagaactttgctttggtaggatcggaatagttggtttctgctacccttgtttttggtttatgcctcctggttggttggctgggtacggccgcccccccccccccccccccccccccgattttgcttgccagactcggttaattaatgaggcacttgaatggtttttgagttttcaaagtacttaatctagtgatgcttttgttgacctccattttgaatctctatacatgctgggtatgaactacttctctgttcccgattcgggatcaacaaacaaaactgtcctgatagtcctagatagcagcaatagcttcaaaggttcagagcgaacgaaaataattttcaatagtgctggcacatgttttttcagaaacatcgagtggtctcaagtctcaactcttcaaatcgaacaactgctttcttggatccacatcaacaaaataggatgtctacggtctacctaccaagatcagcgctagtatctacttcctccgtttcacaatgtaagttattttaacatttctcacatttatactgatatgaatgaatctagatatatatatctatctagattcattaacatcaatataaatgcggaaaatgctagaatgacttatattgtgaaacggagggagtacttccttgtcaaatcttcgtgccggtgtggaggccgacaccagcagagggaggtgacaagtggtggcgcgggcgtagagcacgggagtataggggatgtgccaccgtcgatccgtcgtgccggaaggtggatggaaaaaggaaggaggcgcggccgtcgcgccggctcgaagtacgcgaaaaaggaggaggaggagggagcgtcgtgccatgcgggctgtaggcattttgtgcctgaaatcggcccatggtctgaagtaggccgtagcgggctgcttcttgggtcacggttactctttcagctcggcaacagcaatagactcactcactcacactcacggtcacaccgatttctccctaggcgaccataccggaaaacccgcgactccccaactccgacgagaacgacatggacgccggcggcgaggaggcgaagcaggagcgccacctggtgctggctcacgagctcttcctcctctcccgccccgacctcgacgacctcgccaatgtcgccctccgctccgatgccctcgacgccgtcaagtccgatggcatggcgccgctgttcgagtcgctggccaccgcgggcgtgctgctcaagccggacgacgcagctgctcgccgagatgcgcgcgcggatcgacgaggaggtccgcaagctcgacgagaagtgagtggattcttcctctcttcgattttatttctagccccacaaaaaagaggtcgcccgttgctgtgttgcgtatgcctgcagtagtactatgtggggataggttttgtgataaataactctggtgttgatatgatccgtttgcctaaactaacctagcttgctctcggtgcggaacatggatgctaaagctggtagacagtggcgaagctagagcaaaatggaggggggttcgagattttgccacaagtatatcaatatatataacttcaagctacattttcgatagaaccgttgattaataattttttacatcaacagtagagacacacatgcatcaataaaataaaaaaagtgacaaacattgtttttcaaaattaagaaatccactaataacattgataattgagaattggttactaacccatgagcaaaagatgatctgcatatgcaaacataagcaaacaccattctatttcattatctcaacatcctcgacgatgatttgataacctaaaacaagttaacatcaaaatcagttctcatttttcaaataaaaagtagaatccagcgcacttagatacaatcattaccttcaatcatcatcaaatatgcgtccttgcattttcatgaagcgacgaacaacggcctcattggtgactttcttcatttcttctttctccacataacaaataaggctatcacttaagtactcatcaccaattttattgcacaaatatgttttcacattcttcatagctgaaaagcacctctcaactgtggcagtagcgacgggcaatacaagtacaagttttaaaagttgataaaccaatggataacaaagatgttttcttgtctccaccattatttgagaaagctcggcaatagtttgtatgttggagaatctaccatcatccctcacatcagcgatgtagagaccaagttggtggctaaggtccctcaaatttccagaattaaaatcactaggatacaattttgctaaactcatcaaattctctagattgaaatcatgaaatgagtctcttggactaaaagccgatgagcaaataagcaattgagagcttgtctcactgaagcgattgtcaagctcttgaagtatccaatcaataacatcattaaaacaatccacttgatagtaatgcttgtttgtaattctagatttgtgcctacgcttcttgggatcaatatatgtatcttccatttccaatttgacaatatcatacttgtcacaaaagtcagagacttcatctagaactttctcccacttttctcttctaagctcatccaaattgagcctagttgactttacacatttcatagcattcactatgtcttgatccttccgttgcaatgctagtgacaagctgtttgtgattgttaatatagtcaacatgaggtgcaaatagaagacaaaatcaaaagattggaagtactccaaaagattcgatgcttgatctctaattttccaatcatttttgtctttttccacaatttctagcactttgactattgtagcaaacatgccaaccaaacttttgagagttttatagtgggaactccatcgagtatccccaggtctctgaagacattgctcttgattcaacccggttctagtttgaagttgcccacaacccaatgccttactcatttctttaacattaatatctctaatcaaatcccttctcttagatgatccacccaccacattcagtaagatggaaatcttagtaaaaaaatcactaacgcctttatgttttctcacaatagccacaagaacctattggagttggtgagcaaaacagtgaacataataagctgaactattttccctcatgatcaatgattgcaaaccattgaactcacctcacatattgctagcaccgtcatatccttgccctctaacttgctttagacttagcttcagttctgcaaatagagcatcaatagaagacttgagataggcagaagttgtttcagtcacatggacaagaccaacaaatctctctctcacaattccatatttatcaacatatctcaagaccactgccatttgttctttgcaagaaacatctcttgattcatcaactagcaagcaaaaaacatcatgcccaatttcttctagaatagcatgtagcacttcctttgcaaaacatttcacaatatccctctgtatttcaggagcaaccaaaagactgttatctgatttttttgtacctattgcctttcttaaggatgggttttgctccgctgtgtaatcacgaaattccctgaagttgcctctgttgtagggctcctttgactcatcgtgacctcggaaaggcaatcctagctttactagcatcctagcaacatcaatggacccattcaatcgagtaagatagtccctcttaccagtttctctcacactatgaaaagcaacatcaatgtgctgtctttttttgtaataaatcatcacacttcttcattgcttgatagtgtgaaccaccgacatcacctacatgcaatttcaacctttcttttctatgaaaaccattccaaccatttttaacaaatgcttcatatccaccatccttcttttctctaaacaagaaatagaaaaaacaatatgctcgatttttggactcactgtattcaagccaacttccaaactcatcaaaccattccgggacaaaccttcttgaacctgtcataggaaaagcaaatgtgcgaggttgacaagggccattctccaagtatttccttctcaccctctctctgagattaggatggtactcatcaatttgttttcttaatcctggatcatatttaatctcatcttcccagtttatatcatccaaacatgaattacatgcattgttagcactattcggctctggcactttccttttgtaaaatcgttccatcaattaacctatcattagatgatttaggaggatgtaaatatatactgattttatcattcattcaagtacagaagtagaatgaaaattgatatgacttacatccaaatagcaccttcaactcaaattctcaaatttccccccaatctgcaattttattccaattctgaaggattccaaattgaaccctactggcctcctaattctacaatgtaaaaaaaaacaaccaataaaaattttaggcctttgtatctaataaatcaaattgattaaaaaagaaatagatgaagcatgctttcttaccttgtctctactaacgcacaatgtggctgtgtgctgatcagttgatggagatggatgatgtcattgttggcttcatggcttgtgaaagtgtggtctgacgcttgctcctggttagctggttgcctggcgaccggcttcctgccttcctggctcctgcggctggagcgagcaacgtaggcactaagcaagcaggggcgacggcgacagcgacagtgagctgccgagggcgacggccgacggcggcgcgtcacgatgccgagatgggcaagtgttgtctgggagactgggattggctgattgcagagcagtggcgtggaagccaaacagatgcgaggcggagtcgtcaagattggcagcgacgggacgcggcatacgagaagtcgagaagagaaaagattgatctggattcgactctcctcatgggcttacaacgttaactggactgttgtttggactgtgggtgcactatattgggccaaggggggtgcatatagggccgagatatgggggtaataactaaaaattttgtttgaggggggttcatctgcacccacgggcctctattgggcttcgcccccgctggtagatccgtagatagcttgcatttgatttggtagttgtaaatttacgaattatgcttagggtcaattcacctctatataaatctgtactacataatactaataaactttctccacagttttgttttagattcatgtacatattgatgattttgtacattatctctgcaatgtgtaatttagcatgtagaaaagtaattgagattgctaaggatcacaatgcacaacatcccaactgatacgaataatttgtgtgtcccttttatccagaaaaaataccagtgtaaactaatgtgaaggaagaatggcatgttgaacttcgttagtaatatggtatcgatttccttggtcgctactttgttgtcctaggtaaattgttatacatgctcggtgtctgtatgaagtgcatggcaatgcatccggaagcatcagctgtcgccccatgtcttcttgatatgatcagatctaggtatgccaagcctaaacaaacatttccctgttaaggaattttattggtaagttaccattttgacatcaaattttgttctatacagctgtttcacaacatcctgaagcatcagaaggtctgtgttgtttgcagctttttgcatattgatagtgctgcacccattgtatgtctcatcagctcttatagaaggaaatcgggacatttcaactggtttggaattgatacacatatgggctcttcatgttgcagaagctgatcctgatacagaatgaatatcagtatgtactttggtcactatggggggatatatctgttatgaatcaccgatttgcattttgttcgtcaaagtagagcaattatagtacaataggctcagcacataatactaatagggtcatttttgaaccaacaaagaagtacagttgttcagggtaaacgttatatcaaattcatttgcatcgtctttgattttaacctgaaagaagagtattttcactgtgagataattcactatctgaaaataaagagctaataactcccaccttatgctttagtttcctgtaacgtacttctttctatcattccatttggtcttctattatactcaaccagtgatccagctcttttcagtaatgtgtagagtaaaaccagactagttttttgttcaactcataattagaaaaccatttcagtacactggaaactcagtaacttctcacattgtcatctaactcttccattgtcatgtttgtctccttgcaggcatcatgacctgtttgcaactctgttccgagatcttcagacatcatgagcactgaatcagtggatcgcagcatggccaggaactgcaggtctctgccttttaagcttgataccatcaaaatgatcaatgtactggactagatatataaatcgattgatgtatttggtttcggagtgctagatttttcgtcattcatacatagaacatgaattgatttacgtgaaacaatttatgtaagtcttctgttccagattactactatgtttgaaaactttgaactgattagttgagcaaaagaaaatttacctgtggatgggtcatgcagggcgagaggaggaggaggagggcgtgtgctccatggggaccaccagccacagaacggggcactcctggagcgttggatcagctgcgagggacaatccgacggccgagatgcgtccagtgcaggtatttaagcgcaatgctgcttctccttgcgcggtttgctgcacaaccactttctgcttctccctccctcacaggctcacgcattctcatctcaagagcactagtggcgaaagataaagggcaaatgttatatccaattccgtctgcatcgcctttgattttagcctgaaagaactaataatttcactgtgatatgattcacaatctgaaaatgaaagagctaatatcactcatcatatgctttaattttcagtaacctactccctcctctcattcctttaatctaatgttatactcattcagtgatccagctctttcagcaatctgtaaagaaaagagatcttcaaacgagtagattaacaaaagcgtaaagtgtctagagtttttggaggcgtcaccctaaggtggccgtttttcttttcttttggggggcgttagctgcggctagcaccctgctcgactgtctaaggtcgattctgtaaccttcgtgacaccctctttcttcttaatacaatttgggcgacctctttcggctgtcccggcaaatctgtaaagaaaaacaggacctctttttaccttataaagagaaaccaatccactaagctggaaacgcaataacttttaacactgccatctaactccattggcatgtttgtcttgtagatggctatgagctgcatgcggctccattctgagatggcccttcagacatcacgagcactggaatcggcggatcacagcaagaccagcagcagcagcagcagcagcaggtctctctaccttctaagcttgataacatcatcataccatttgccaacatgatgtgatcgatgtactggattaatttgtaaaaaaaacttatattatcttgccatgtaatattacaaattccagttcagctaatcctgctacagtctacatgatttttttttgtctgggatttgaaatgttagaattttggtcatccatgcaatgatgcaaaagaacatgacttgattagtgtggaaattgtatggaagctgtcatgttccagattaggagtatgtgtggaaactgtactcagattgatgaactgactagttgatgatgagtataaaagagaactacacggggatgagtcatgcaggctgagggatccgtggggaccaccagccacaggatggggccactcctcgagcgttggatcagccgcgagggacgatccgacggaggagatgcgtctggtccaggtatttaagcgcaactttttttttgcccttcgcagcacaactgcacaaccacttttccgcatctctctctctctctctctctctcgtctctctctcgcgcgcgcgtctcaagagcagcggcgaaaggtgagaggtgagatctctctcccacttcgtcgtcctctcctctgtggtttcgtccgccgcctccatccctaaaccctacttcttctccgaaagcgccgtgagattcttctccctactcttcttcgatcttgctccattggtgcggtggtggtgtttgtttgcttggtgtttcgtgtcgcggtcctctcgttcttgtcttcgctgagtggcattgatcgagcggcgccgcgcgtcgaactcttgcttgaatctggaggcgtctcggtttccgaaacttgaacctctttaccgcgctatgatcctctttgtttttttttttcgtgttcttggcttcctgtacccgtgatgttgctgcttgatggttgatgcatttgaggcgtggttttcttagagttggatgagaaggttgacgagcaacggaacttcatggtggtctccgactccgttcgcctctctcccatcggagcatgttgatgttgacagttcctggcgcgaccagtgcgtgcgcgagaagttagacgccatgaattcgtctcttctctgatttttttttaattttttcagttctgttttggtgtgttcttattatttttgctgttcctgatgcaatccgctcgtcttccttacgtcttggtcaagtagcaccgcgcctcgttctcttctcgaattttaaggcgtttcggagtccgaaatttgctaagattttacctggcagtgatcttttttcccctcgtgttcttggcttccgtacccgtgttgtactgttgcttgatgtttttgaagttggggtgtgcgtgggtttcttggatgagtttgatgagcaccgaagcttcatggtgatctcgttcgcctctcctcagaacacgttggtcttgatcttgccttccgtttctctatttgtaccagtgcaagcgcgagaaattagaccacatcaattcgtttatcttctctgcttgtcttttcagtttgctctgttttggtatgttgccgaagtgccagtttctgaatttgtattagctagatgccttcttctgttcatttcgctgttcctgatgcaatatgcaggatgcttcttctctacacgtctcttctgttttctgcctcgaaagaactctctgtcctattgtggctttgtttactcgatgctattttttcgttcaatgatttctgcatgtgtcgctccattgaattgcttgtaaatcttctgattctttacctatcaaagaaacttccatctcttgaatcttgatttggcttccttcccccttaccgagcaattgtacttttttttcttgtcttttacctattttttacttctctgtgatagtgttcggtgctgtactgtaggttacatgtctctggttttcttcttcttccgtccatcatactctgtttggaatttctttaagttttgactcgctgaagagatgaccatatctagaggaaattgatcatccttgtacagtacactttatctgttgtttcctcttcttttctcactttggaatttggttttatgatttgtgtctgtaaagcttatatggcgttcatagaaaaccttgtgtgtattttgttcacagtaatatttcaattccttgcttaattcttgtacaagataagatgtaggtgtaaaatactgcaacgctgcaactgaaatcactattaacaccctgtgctttgcgctagataactagtgtcgtatcaagtctgatgattctacctgactttatttcatatgtaaccaagctttctggcatttaatcgatctgtattgttgtttaagtgtattcactttattctttccccgtttttgtcaataatgttattgtatatttgtattcatgttaaattttcagcaaagcaagctccactatgggtaacagccttcctgtagaatcgaaggtcactgttgaagaagaaaatgatagaattaagtatatcgtgtcatctatgcagggattgggtcataaaatggaagatgctgtgagtaaacttgcagccttttgtattacaaaaattaggatagttctgccaaaaaattcttattgatctgtaagtaatttgtgtaaaatgccgagactgatatacgctctccttattctctagcatgcagctattctaagtcttgatgataccacgtccacgtcattttttggtgtttatgatggccatggaggtttgcttcattgtcatcttttttgtttcaaaccctccaaattgttggcgtaactgcttacgtcatgctatgtttgtctgtgtgtatcacatttttatctttgtgcatgttttgaaaacttagctgtatatgttgaaacttttacctgtcaattttcaaataaatatgatgctatagttaaggataacgaaccaagttcagtaatcacattcgtgcggcatgcttgcaagggtaacctgaactacataaaaggaaattttaattcatgagggataaaacaccgcatgaatgtgagttaatacaaatagtcatgataattaagaggataatcacagattaacaggttggctaactctattttcttatgaaacctgttaaagtgatgttctgctactagtgttcataacattgttttaatttataagcttctatgcacatagaagtaatcatgatccatcctatcgagccaccatactgagttgtttattttctatcacaggagctgaagtagcatcgtactgcgcaaaacgatttcacattgagctttgcaatcatgaagactatcacaatgatctcaccaacgcactggacaatgtgttttttaggttattttagcctactttatcattttgtttatagctgcacttggaaatgtgggatatcattgttcttgtgtaaatgctgcagcatggatgagaacctgcaacaatccgatgcttggagagagttagttattcctcgtgataatggatggatgtattttctcaaggctggtgtctgtgctaacttttggcctttcccgcaggtagtaatcttttatcccctagtgtcctcgaatatccatatcttgaagaagttactcaaaattgtatttgttggacagtgtgcatattgtatctatgaaaaaggaaatggaagaatgtgtttgatatcgagactgttgttctttcttgagatgtactttggagttggaggagatatgtttaaccctaacctcgactaattgctcctattaaaaaaggttcaattagttacatatcaattgctggtttacagagttggaggccaacaggttattaagttctcattgcaccttggttcttatcatactatgctacccaaattgaggtattttttgcaacatcccttcgatggctatttctttcgtacactggtttggttttcagaaatgtttttctttacctgttggctttcttgagctattttttggtagccttttccttctatgttgtggttctgtgttttacacttcagttttgttcttgtttttccaggcgtatactgggccagcatatgaagggagcacagcatgtgtggttgtcatcagaggtgaccaaatgattgttggacatgctggtgattctcgttgcgtactctcaagacaaggtggtctggtatagtgattgtttccctattgaatttctggtcgttacctaatttgcatgctcgtttcttgtggtgcctaacatttgtgcttgtttctgttctgtcaaaaggctattgatttatcctccgatcataaaccaagaacaagcgagtctgaaagagagagagttcaaaatgcaggaggaatatctcttggagttgattgtgaaaaagtaatggagaattatgtaatcaaggaacaatggatcctcggttactttggggaaagtgtaacaatctcaagatcaattggtatagttttgcctgagcctatttttcattgattgcatgtaataaaaaaaaccacataacactgtgattggcgttttacctacttacatttcaggtgactttgctttcaagcagaacaaagatttaaatcgtgaagaacaaatgttgatatgtgatcctgacatccacactgtaagtgtaaatatgttcgtttggtagaatataaagtttgttttgccggggtgggatctgatggaaaatggccctttctacgtcagcatgacataactggtgacatggaatttcttgttatagcaagtcaaggcctctggtaagtggtaactcttcagcaaaaaagaactgtcagtaactatttgatcattttgatgtcaccagtactcattggcatgattctttttctcctttttgatgcatatatagtttcattcataatttcatactaaccgcattacgtactgtatattttttccctgcaggtcttgcatggaaagtgcggatgtggttgcttacatacatgtccgtttattggtgagtctttttttttttcctcagtttgtcttcttggcaggacaatatatcttattggtattaattatgctatctgttctaggaagtgacttcaaccaagaaatataaataacctggtttctcttttttatagaataacagtgcttatcccctaaacccccgaaaaccagtactttgtttcgcgctgaatatacatgcctgactgacaaactgccatctgctttgagtttggattctttccctgttaaaactgctgttaccaatattgctgtgaccaattaatattgctatgcaggagggtgtagagctgcgtgtcatctgtgaggagcttgttcagtccggcttggcatcgggcgagaacacgaccgtcatcctggttcagttcaagcccggcgccttccagttccagtatgagctagtcgatcccgctgcctttgacactgccgcctctaacgttgccagcaccagtgccggcccggctggtggcagcgacagcgacacgagcgccacgagcgacgagggcgtcgacgacactgccactgccgggaccaccaccacgggctatgaggccggctccagcaccggccccggcagcggcggcggcagcgccaatgccgcgttcgacagcggcggcgacctcgccgctaacttggacatcgccactaacttcggcagcgacgacctcgccgctaacttggacatcgccacggacatcgacaccgaggacgtcttcaccttcatcaacagcgacgacacgttcggcatcaacagcgacgaggtggagctcgatcccaacttcaggcccaagcctcaggtccgcagggcccacgacggcccctctcccactcccagcgaaatcgaggccgacctcaatgccagccccacgaggtacaatatgagggatatcttcgaggccttcgacaaagtcgaggccgagttgggcggcttcccgttacagggccacgatgtctccagcaccagcaccaaccccaacaccgcgactgacactggcagtggcagccgcaccggcgacgatgacgtcgacggcgccattgccagagccatggccgtggctagcagcgtcatgacgggcgcgggctacgaggtcgactccaccaccaccaatcccagcgctgcggctgacactggcagctacaccggcgacgagatcaaggtcgacgacagcaccagcggcagtgccaggggtgacagcggcgagctcgtcaacaacgacaccaccgttgctgacaacaatgccagtggcgttgctgacagcaccaccgtcggcgacgaggtcgatcccactgccactgtcgcggccgacgacagcaacaccggcgacaaggtcgatccccctgccatcaccaaagccacggccgacagcaacaccagcggcgaggtcgacgtcgacgccactgccactgccactgccagcgccagcgccgccgtggctgatgacgagggcacggctcctgatgacagcgagggcagcccgtagatgcatgattcagaagaaagaggtcaccggttcattacagcttccactcaattttgtccaagacggagatgatgtgtgatgatgcatgcaccactgcattcgagggatgttactgatcataggtagtagtagtagaactaatgcattgataggatcggagtagttggtttctgctaccttgtttttggtttatgactcctggttggctgggtacgtttggggtaggagattttgcttgctagacttggttactgagaacacttgtctggtttttgagtttttatcaaagtacttaatctagtgatgcttttgttgatcttcattttgaatctattacacatgctgagagctgagtatgtactacttgctctgttcccgaattaatgttctcttggatacgtaatcagtaatgcgcttggtttggctgattacctctcttctcttgtctgaactgaagagaattgcgtgctgaaaccggctctgaaaatctgaagccggcctatggcatactccagcaccgcaacagcaacggactcgtcactatcaatataaggaaatcgggacatttctactagttctgcacatgggttcttcatgctgcagaagctgatcctgatacaaaatgtacgtcagtaagtgttctggtcattatggatcactagtttgcatttcgttcgtcaacatagagagcaagtatggtattggctgagcgcataatattaatagcgtcattgttcaacgccaaacaaagaaatacagttgtgcagggtaaatgttataccaaaattcatttgcgtcgattttgattttagcccgaaagaagagtaacttcattatgagctaacaactgcaatttgggtcaattagtactaaaatcaacccaaatactataatctactctctccgatccccaaaactctcttgcttcgtgctgcccaaactcgcaggaccaaatatttatgtccgaggtgatctcccttgtggcagacgaactgtatgacttgggaacaaatgctatttcgctgtcacgtataacaaggtcgacatggatggtctcgggccagtcgtacagcctcgggaggaacaccttgttgtgcatcaacctaagcttagtcttcctcaacatcgtcgtgtatgtcccggtgaacaacgcatgtccttccaatgaccgcatcttctcccactccatcgtctcttcattgagcttgacgacatggacaggcgcaccactgtagccaacgaggacagccatgagcgcgccagcttggtcggactcaaacaggtggctatcgacttggtgttcgattccaaagctcccaggcttatcaagaaccttaaaactatcgccatggttgcacggatcgtacaccgcgagctccccgtcttcgccaagaacgtacagcaagccaccgtggagcaccgggttgctggtcggtgccgccagaatttgcggtccgaagcccgtcaattcccagggcccccattggccatcgtcttgttggatcgcacgggcgagccgtagcgcggacgtcgtgttgacgcaatacatccttcgcgcgcggtcgtcgtagacgatgaaatcgggcgacgagtcgaaaggcggtgtcggcttcggcagctcatggatggtgctgccggcgagtagtacgagatcggcttggaggatcgatttaggtgagcacagcgtgaggcgtcgtccggtggagcagcagatcctagcgttaggcaccttgacgagcgtgtcggcgatctggaaacacttgtggtagtaggggctgtagtacctggcgctcgtgacgccgacgtcggcggcgctcaggaggagaggcgtgatccacgccgggtagaagggcgacacggcggagcgccagtgccggcacgtcgacgcgaagctggggtgggtcgaccacccgagccgatattccaggacgagcacgagcatgtccaacgggagagacgaccagtcccgtcgtccttgcgccgccgtcgcggcggccgcctccatctgtcgatctctgcttgcgcttctttttgcggtgctcctcacgcgagtcgcgagagttcgtgcctgcatggcgagctgcgttttgtgctgctacggagctctactttcatggcgtgtttcctccggactcgtattataggtcggcttcagctcggagattgtataccgccccagcgccccggttggtttttgttggtttgctacccactctccatatatgcaaagtatttagattttgcttttgaattgggttgatagtttgaattttgatatcgtgtaggaactcatgtttccttttcctgatctacgggcggtgcagatgataattggtaggagtactaattgtaggtagtggacgtgcatacctctttcctatgccaatagttatttataaggactagcaaatatacccgttcgttgcaccgggtgaatatcaaacaaatatggatggttaagattgcttgtgtacttataatacatgtgcacaaaaatattgaatttgtacataccttgcaaatatctccaagttttatacaggaaaatatcaaaacatatctcatactgtatacatattcagattcaggtcgtatctcaaactatattccaaattttctacacattcagacaatattccaactttcacaaattttcataaacgggggcagttacagctctgaattcaccatgctctacaaaagaaaaatggtaaaggcatctgcaatgggaaagaaacacacactttgtagtatcgaaataaaattcactcaaaaatctttagtggaatatgtttgaattctagaaataatttaatatttaaggaaataatggggcgttttggtttgataccaaaatattgccatatcaattttttggtagtttaaatagtaaatatgatgatttggtttgaagccaaatgtttggtaatgcctatactcaatttggcacaattctagaatattcttcatcacaatttaaaatttggctctcaattggcataaatccaaagacactcatttataattctaccctaccaaaatattggtagtgtcaaaacttgcctagagtttggcactaccaacataggataataaaccaaacaagcccaataattattttgacatgaaaccatattaacttggtcaaatacaatatcatatgattaatactttctagataaattttttgttggtttcatttatctaaaaataatctatgagtgattaaataattaatcgtaatttcccaacaattttaaatggcttaaaatagtaccaaacaaatttctgtaaatataaaaataattaaatcagttgcttagaaaaataaactgattttggcctagcattgtggtttagggatgaagatttggggacaacttgagggaccaaatctgaacttatccgtgcgaagcatacacgtggcccaattgtgtggcggcctgggaacggcaacccgacgcgggagaagccacactcgtctgatctgatcaacggtcccgattgatccgaacatatataaaaagtcggcagcccaaaccctaaccctaaaatcacttcccctcccttctctctctctcaaacctacggcgtcagcggcgcctctccccttccgccgcttcccctctccctccccaccggcggcgccgctccccttccccctccctccatcagcaacgccgctccccttcccctcccccatcggcagcaccgttccatctccccctctccctcccgtctcgctagcatggcacagtgttgggggacgacggcgacgacgaccatccttccatttcccctctccccgtaggcctcgatggtggggctacaagcctatgacacggagacggcggcgacgacagtccttctctctttctctcctctgtctccgagcaagaagagagcgccggaaggtaggtcgccggggtagagggagggggtgtgtaagttcaagtgccttaatttggtttcggtgattaatgacaaatctaattatatgagactaacgtttttatgagtctttctttgactagtctcatttggatatgaaagtaaaaatgatgagaggtatgtattaaacttcacatattctaacttggtctctcttgtggatccaaaatatagtgtgagcttcctatttgatctttattgattatgtgcatatgcgttccttcatatgcatatgtatgcacatcttgagggggagcttattctattttttttattataagatttctatcttgatttgaaattattttttatctcatctctctatattgtttatatcgggttattatccatcaccaaagagagaaaagattgaaagatcttggattaaacaatttgtgtaattgttactttggtgatagatgataaaccgatgtttatgggattaacttctcttttgtataagttgtctactaggttatttcccgataatgagatgtggaagacatgcatttttttgtgatggaccttaatcatgacaagaatgaaatgcatggagataaaacgatatataccacttcttatctcctacgttttgatatgttcatatatatgatttccatgttattgatatataagtgtgagactaatgtttactcgaatgttatcttatttagtctcatttacattgagaacatggagatcatgaaggtatatgttttatgttagtctacatcattactacatatgtcttctctatatgtataggataaacccccattggtcattctctaattatgcatacacttgcatctcttgtatatttatttgtatgcatatatttagggggagcaaatcctatacatttattgtgcatgttctagatccatgttgttcacctattatttatatcggatctttgcacttgagcttgcatacgagtatatgacacttgtgatgttaatgaatactcaacaaacatatccatatatttcatatgcacccggttggtcatcaagtgaaggatgacaaccgatttgttgagactaatgttctcctttgaggtgtgaaaaggaataggtcccactacgatgaggctaatgaatgacaccatgggttagtggtcaccaagccaaggacatcatcatgttggcaagaatgaagtcaagcttgtgatgagaataaagtcctgacaaaagatggacaagacctcggcataaacatggttcaaccggatggttacaagtgttgatctcggctcaagcttgaccccaagatggatggcgcaaggcaaaggtataatgtagctaagaatgttttcttagtcttttcccggtcttggtgtttggtgtagaccggatttgctagataggcgccgtactatcaagaggggtctatgaagcgagcttgtggatgatcttgtgccatattagttcctatgcatgtaggtgcattttgtgggcttgtctaaccaagtgtgatgagttttctcaagtcctaaaccaagagagaagtgggcatgtcaaataggagtgagtgacatcttgtgggtatgtccggtggatatcctttggagtgtgagccctttatccttgacttaagttgtgtttcttggatggatttttcatgggttggatggccctttgaataagctttccatatattccaagaacgccaaattccgagacccgagtcaagagatatcgccgttttactaacggtcggttgagctgaaaagtgacctgcggtctgaccgtgggccttaggccggtctgaccgggtctgttagccagtctgactggcgtggtaaggccggtctgaccggccccattggtctgttgcactagtctggtttttggtggcgatacagagccgccagagccgcaaccggtcagaccgagccgacagcagtctgaccgagccgtggacggtctaaccggccactacactgcggtcagaccggccaggttgagtgggctcaatgattgccctgtaacggctagttttctagccgttacaaagtagtccggtctgaccggcatcacaacggcggtctgaccggcagaacacaaagttggggattttggttccaacggctagttttgatggttgggggtatatatacccactccccagcagcaagggtaaggttttggcactccattgcattatcttgaacccttgcaagagctctcacacccttgtgcacttagtttatctagtgaggtgttagagagtgagttaagtcaatccaagtgcattgcttcattgttagagctagtgtggcacctgatcatcctcggcaagcatcctagacttgttactcttggaggttgccgcctcctagacggcttgtggaggtgttgcccggtgacctctccgaggagattgtggaggaggcccggcgccggttgtgagtggtttggagttcaccaccttcggagcgaaggaagaactacccctagtgatcgaggcttgggtagtcctctccgtgggccggctctcaccttgcccaccccttgacgaagggggcgtgcggtggcttcgtggttgagcggtggagttgggctcgcctcaacggggattaggaaaccggcgagtttccgaacctcggtgaaaaattccttgtctcttgtctcatttattttctgcatttacatttgtgcaatttgcattcatagagacatatttgagcccatatcacctaggtttgcaaaatttaacttagttgcttagttaaccttgcacctcaccttgcctagcaacttaggttagttttgtttaagtgccattaagttttaagaccgcctattcaccccccctctagtcggcctccttgatcctacagggtgccgtgcgcggttggggatgtggtgagtgtggccgtgcccggcgggcgaggccatgacaggagcgcggtcaatggcaatggtgactgtcacaccctgaagttctttcccaagcctaaattgaagttataaatggtctcaagaaaataccagtgtaaagcaagagtaaaccttaataaattaatgcaaataataatcagatttggcatgtgggatttttcttgagttctaaatgtcgaaatacgctaacaagatttttagtggaattttcagagctctagaaataattttaaccaattaaaattgagcacaagcaatatttaatcccaggaaaatccatttccttccttttctttttcttttcccctttttttctttcgaatgggccgccggcccgttctctctccctcctcttcttgttgggccggtcgaaggccgaggcccagccgagctgagccagccgcccgcctccctctcccggggttgccgacaggtggggcccacctgtcgggcccgtccccttcctccggccggagccgccgcgccccgctcccacgtctcccgggccacgtcgcccacgtcgccctcgcgcccgcgttccccgcgcccacttcccctctctcccgcctgcgcccgcgctcgagacagccgggattcgattttcgaatcccgcctctctctcctctcccacttcccccacgtcggccggcgattccctcttctaccggccacgtccgagctccctctcccctatttaagcatccccactctctcctctctctttttcccatttcgccaagctctcccgtgccctctatcgccctagcgtcgtcaccctcctctccgccgctgccgctgctccggtcgccgctagccacctctagccgccgtgccgagccgtgtcgtcgacgccgtcgcgttcgccgtcgtgccggccaccccgtccacccctctcccgtcggattccgccgccggaacccgctccacgccgtgcgccggtgagcatcgccatggccgccgcccttggccgccgtcctcgccctcttccatctccctctccctctctaactcctttcatcgtgttcgctaggtggttccggagatcgtcccgccgtcgccatcgccctccgtcgctcgccgtcgtcgcttgtcgtcgatgaggcacctcctcctctttctctctctctctctctctctctctcccgcaccatctagtcgccgcgccgccgcctagccgcttagccgctgccagcgtcgccgcgccgtcgcgccgccgccgcttgccgtctgccgcgccgccgccccgcggtagcgccgccgtgcgccatggccgccgggccggctcgagccgcccgtgcgcgccggccgcgtgctccccaccgccgtccgatctaccctcgggtagttcggggccgtcggttcagccgcccgcgtggcgtgccatgtggccgccgcgtgtgcgccacgtcagcgccacgtggtgcgccgctccttccccggtccgtggacttggtccaccatgaaccgccctccccgagtcactgccatgtggggcccgcatgtcggcgccgcccctctctctctcccgtgatttatttattgcgcaataattcaattaaggatttttctgtttatagtaaaaacacagtgaatcttctaaaatttatatctaattcatccaagctccgtttaagcccattgaagtctcagtaaatcaataaaaatgtgtagaatccattaaaaatggttttgttctctgtttcagtagtcttatagcctgtttgtattgtttgctttgtatgtcgcttagattccggctctccccacgctccggtgtactttgaaatagtcgccgaggttcctccagcagtagagcaaggcaagtcatgcttgtcacttgaacatgttgatcctatattgcaaatgctccattgttttccttcaaatactgcattgttttataatattaccatgggaagtttacctactgttatagccatgctattttgtaccatgttcctttgttagcttgggatataacatgactagagattggactagggatttcttagccttgcttagttcaactagcacacaatgggggacaacattaatgcatagatatcagattctaggaatgatgttggttaatgctcaccgctccagtgttggttaattaaaatatattaaatggtgggctgtgggtgcatggttttgatggtcgcgcccatggcaattaaggaccggttcgcgggaaatcctggaagaattcctcgtacttaccacaagccagcgtgggcaacggctgagcttgtagtgtagcttttctctagccgacacatccaggcaagggtgggcgtgatggagtttggatgggccttacgacggcctatgcggcttccggattcacctaggcacgagaggggactgcccgctgccttgcgagaagtgggagtgaaacctgaggtgtggtgtgcttggttagaggtggttatgcgaagggtcctgtcatggcctctttccggtatgtcgtggtggcatgtcggcgcacggaaacgtgtcgtggggctgtgtcttgtgggtacagttgtacacctctgatcagagtaaaactattcaaatagccgtgcccgcggttatgggcggtcaaccagattcaccgtgattagtctcaccctagggtagtctgatggaactgattagttcaggtggatggttgggcctgttgcaacgtggtgtagcgttggacagtggatggttaatattgattaattactataatggttttacttcttccaactactgtttataaatgctcgctttatgcaaatgaaccactctagctatcctttgattaccctgcatcatacccctatcccggtatgacttgctgagtacagtgggtagtacttagtcttgctctatttttcccaaaccccagagtttgagtatgcgtcagatggtggcttttccgaggagtaggtttcgtccgtgccatcgaggatgcctgtggagtggtgttcccgctgcagtccaagtcaaggctaagctccagatatcttttaagttttccgctgcatttatgtaagacttttataatatttgtaagacgtggatctgtatgtcaactttgtcgtttgtgtaccccggccggtcctggacggggattttaatgcacattctgcttggaattctattcgggaatttctaggcgtgacagtgacgagctcagaacaaccggatccgatggcaaactcgctcatttgtgtgatttttttcctctctttttttccttttttctagggttctcaatctgtgtaactatccgattggatgattcttttagattctccgtgtagttctgtttgataggatgacttttttcaggttctctcagtccgtgtagatctttgatttgattttgtgctttatccatcgtacatgattggtatatagagtgattaataagaacaaaaaaaattctaccttttttatcacggacggtgggtcttcttttctccgtgtcattgatgaatcggacttttcttttttttttctttttatatgatgagggcatcatcaccatggataaaccataatgatgttttacctaatcgaacataaggtgcaagcttcttatgaatcggagaggtgtatcgatcgctaagggcgcaacgcaatgccttgtacggttgtagtcggatcatcaacgtttcttccaaatcgtagttatctcaactcaccgaaagatcggtccaaacaacagctttgagcatcttgagtggagctcagggtttatcattatatatttgttcgcctttttttttatcacgatgacgaaaacaccttcaattttttaagtatttttttaagtagtagagatagagataatagaaagattaaacaagattcgatagacgcatgtgatgatatctctaatctaaaaaatataccaacttagtcttggagattctcatagagatatgttgtgcgtgtgtgctttcatatggatcaatgtgcacgtgtttatatgaatgcatgtatctatactgtgtttcgaaaaaaaatacaacctgttctcaacgctatattgacgtgaaagtaaagtgaaagtcttttttactttcacgtagaataattgattttgtatttttcttatttacttaaagttgtctttataaattttagcaaatgagatattttcaatagactttcatgtctaaccggaggaccgtagcgtttaaaaaggaaagaaaataaataaagaaaatgggaaccgttttctcgctccccttcccaggcgctatctcctcccaccactcgaaccttatcccctccaggcgcctcactcgaaccttaatttcgtgttctagttagaaatttggaatttagaaacacagctggattggggttctcctatggatcatgcttcagattttatttaggtggattagagtcttattcctttcgattttggaacgacctgggctacggactacacacgttaggatttttatcgatctctttttctttctttggccgctgtaaaatagcgaagatagagggccactcagtcggaatcgacggacgaatcggtcggaattgacgcacgaaaattttgtgacgaaaggaaaattttgccaaaggaaaattacgattctttatattagttaagatttatgaatttgatcggccagtcgtccgtcgaaatcatggaggaggcagtcgacgcatctgccgctctggatcccaagcttgctcctctgctgctgttcggcggccacggcgacgccacgttcctgtacagcgtgccgaagagagcgctgctggcgccaatgccaacgccaacgagggtgggcgacggcggcgtcgacgacatgatgagaggccaccgctggtggaccacggcgcagggctggttgctcatggcgcgccgcggctcgccgtgcactttcctatgggaccctttcaccggccgccgtgtcaggctgccccccgaccacgacggcaccgtcctcaccgccgaaggcagccatcgccggaggtgcctcctgtcatgctgtggtcccatggacccgaccagctgcaccgatctcgtcatcgacctcgccgacccggagctctggtattgccgtcccggcgacaaccactgggtgaagctccatcagcaaccgtaccagtaccgcaaccctgcccaccgtgacgccatcatcagttttttacgcaagtttacggcgatcgacggcaagttctacaccgaactacacaccggcaatgtcggcgtcctcgagttctcgccggaggttgccgaggggaactaattcccctcggcccaccggcacccgttgtcaagcgttatcaaatccatgcaggctcttaagtcgtgtagttatacaaagtcacaaacctgtattatcgacgaaaatctcgttccttgtagattgagatgcatggcctctctgtttactttaaacatcattcaagcggacaacaggtggatgttaatttgcctaaaaccgacatttttcatcttcactaatagctgatccattttgctgtgctacttatttactgttctctgcaatgactgtttggagatgctgctccacaaaattcagtggtgaatagatgtgtcttgtgtatttatcatacatctgttcactttaagccaatattcgagccttttgccctgttacatcaaattgcattattcacttaaataaataggtatgaataaggttactcaaaaaaatgctttcgcagcaacaaatctgacaaaactgcaaaagttcacccttaagaagagggatatatatatatagcattggttctgcacttctgcatgctaaagtactccacatgatacagcaggctggctttccatccataaggttacaaatgggcaggattgccgtttctgtttgagataaaccaaaggagttgcaagttagaataaagcatttatagtcacatcatgcatacagtttcagtactacctccgtcccaaaataagtgcagtcgtggaaattcgtgtctaacgtttgaccgtccgtcttatttgaaaactttatgatttttttaaaaaaaattagtcagacataaagtactatttatgttctatcatttaatagcaataaaaatagtaatcataaaaaaatttcaaataaaacgaatggtcaaacgttggagatgaatagtgcaaaactgcacttattttgggacggagggagtacaagatacaacacacagcgaactggcaatagattgcttttttgtaaatcttagcactccaatgcagcttgagcttgattagttccaggtgttgacagacggtcctgtgactggttgctcatctagggcacggcgcaactcctcaaagaagttcatctgtactaccaatgaccacagaaaaggaatcagagtacagaaactaagacgtaggagaacagtatgacaaaatcgcaggttcaatatacctgatgaggaagtttcatgtgaccatgaccccatgatgatccactagatccagagtacatcaccggcttatctggcaaaacatcaacagcatttaataggttactttggtttagtgcttcccgttggtacaactgacatgaaaattcacttgagtgcacagggtacttgatggtgttcatagtaacatattaacatcacgaattgctatacaatactataattgctagcaccataattgtgcggcgtcactactgttgccaacactttatattcacctccatatttctatcataacttatgaaacggtaatctaaattaaacataggtctaggatagtatgccaggtcttgtagaaattgatcctaaaatatctaaagattcctctaccatgattcatgacatagtaaatctcccatcatgcggcctgaatttgcttaaggactcaccaggggaatcatatgactgatcattgtacaagttcattgctgcagcccaacctacaggggaaaagcagcaaaggtttattatcacataagaagaatggttgtaaataaagttggttcaaaattagtacagcaactgtaggaatacatctttgttatatatgcctagaccatccttgattaaaagttgcctaacttccggtaaattaccggtggcatatgcacaattgcacataaagagaacagttgatggtatgattaatgaacaaaaaagataggataagcagtaggtacacagtttgaatattcttccatgttactaacatgcagagaaccccaaaataaatcacaacaggtgctccacgtatttttctttacaacttacagtatctgaatattggattatcagcctgtgtaaacttattaaagcaatgggcggttctgtaatatactgcatgtgcttttactacttactccctccgtcccaaaatataagcatttttagaccacgacatagtattcgagatgctactttgaccaacaatatctataaaaataaaatggtttaaataaaaagagttgcatataataatagtttgattaatgataaatttagtaacatcaatttcacattattgattttttttatttttttgctattaatagttaaagttaaaaatggttgacttagcactatgctaaaaatgcttatattttgggacaaaatgagtaatatcttattactgtagacataatgtatcactaccacaataacatgcaacaattcccagaaagtcaaaaagataagaacttatatcatagaacttctacaagcatttaaaagggcagcttggtctctgagaaacatacggtcattgagaagctgggcagcctcactggcacaacatccctccaagggtattaatcttgtttgactgtaatcattctgaggattgctgaaaaaagtctcatgagggataattggtggaaggttctttaatgaaggagcatggctcttctctccatcattattgtacaaataactagccttctcagccctatctgtttggtataacaaaagtgttacagtgtcagccaaaaaaaatcacctcataaattaaattgttatgcttaaacatacagataaatcattaaaaaaacacatggataaggaaaagatagcccataaaaaaattattggaaatatgaataatcaaataaagacatgtcaaggttagaagattctggacagctattggacataataagtaaactctgagtaaaaaacacatttgacttgtaaatgactgattgtggggattatgattgcaggtagcttgcattagatgcatgaagttgcatgttgtacagagtattggcatcattaatacaatggagtagaggggctcatacaaggatgtttgcttgcaaggatttccttatagatatagagtagttatcaacatggtcggtgtaaggcacatatttttcagcccatttgtggaaaagaaacatggcagtttcactgcatagaaatctactagaggaataatgaattaagtttgataccataacaaccaacaactggataagaccttatcaactaatttggagaccttatatagcagtcaagccaaaataataataaaggaaaatataataaatccccaaaacatcatgaaatccaactgattcaataataattgcgtcgattgttagcacggttcctgaagcatattcagtaaagatagccatcagaaagcatatctatgcatgatatgtagcaagattattaaaactaaataataactaacattagactgcagacaacagaatatttcaagaaataactgatggtttcaaacaaaataaatatttagctcataaatacaaagatggaacaaagaagccatatcaagttatcaactaatcaaatcaacaaggtgatagactgattgaacaatatgtcttaagcaaatctacttcttcattgtgaactccacttataattgtgaaattgtgattacgcgatcacctatcaaagggcaattttcaatatctggcagtacagtaactaaagtatgatagtctttatgcagtcattatatgccctgtgttgaagtcatgcgttaaacttatacaagctgaccgactggcagagttttgctaggcaaggttagcttaatccgctaacccaaattcgaaacatgggcaatccttcacttgctaaaacaggtagttaggtcagcattaaacatgccctgaaataagccattagccatgtagcttgaacaaagatttttctaaaataaataaaagttagttgctaaggttgttcattctcaaaaagctaaaaagagagaccagcgagccaataagccttataggtcggcttccgcttggagattgtataccgccccggcgccccggttggtttttgttggtttgctatccaatctccatatatgcaaagtatttagattttgctttagaattgggtagtggtttgaattttgatatcgtgtaggaattcatgtttccttttcctgatcaacgggtggtgcagatgattggtaggagtactaattgtaggtcgtagatgtgcatacctctttcctatgccaatagttatttataaggatttatgaatttgatcggccagtcgtccgtcgaaatcatggaggaggcaggcgatgcatctgcagcactggatcccaagtttgctcctctgctgctgttcggcggccacggcgacgccacgttcctgtacagcgtgccgacgagggcgctgctgccaatgccaacgccaacgagggtgggcgacggcggcgtcgacgacatgatgagatgccaccgctggtggaccacggcgcagggctggttgctcatggcgcgccgcggctcgccgtgcacttttttatgggaccctttcaccggccgccgtgtcgggctgcctcccgaccacgacggcaccgtcctcgccgccgaaggcagccatcgccggaggtgcctcctgtcatgctgcggtcccatggacccgaccagctgcaccgtgctcgtcatcgacctcgcctacccggagctctggtattgccgccccggcgacaaccactgggtgaagctccatcagcaaccgtaccagtaccgcaaccctgcccaccgtgacgccatcatcaggtttttacgcaagtttacggcgatcgacggcaagttctacactgaactacacaccggcaatgtcggcgtcctcgagttcttgccggaggtggcgttcaccaagatcgctgtacacgacgacgataggagaccggcggtgtacaagaaacgtactacttgcttcgtggaatcaaacggggagctgcactccgttgtcttctctcacccgatcggatgtgaccggattgtcgcgcgtgtaggcgtttacaggttgagcattaatgcggcggcaacgcaggagcaaagatcagcagcatgggtgaaggtggattcgctaggtggcagagcgttcttcgttaagataggcagttttggagcgtcacttgatgcggagggaacaggcttgagagggaactgcgtctactactcggtgttcaatgggaaagtgttgtgtgtatacgacatggaacgaggaactacggctgtaatcgatcccggcacacatcttccgtatcaccagtcaccccaagtattgatgccaacatttcctagatatcatggcggagcaactcgaagtgttgaaagcatctatcaggttgggccaacaattcaggaaaatgcttatgaggtaaaagacactaaggtaagtaaggtgaagagggatgttcgatttttcgagggtggttgtacttgtttgccgattcctattcaaaataagttaataaatcagaagaagagtaagaggtctatggctgaaagatttccttgtcaaggggaaggtgcaagcagtcccgaaacgaagaactcataccgcggttgtggctttcctttggagccgctcaaatgtcttctgcgtatgaagaaataggagtgcactacatagaggatccaacttaccttttatgccaactcgatgagtgtttttttagttaactcattcattcaaaatatgcactaatgttagctcggctatgtcacgtctattaatttcattaagttttggtctctactatgtgattgggagctctttttctctgaaattttatgaaaccatcttcttttttcttttaggtgtttaacagctccccaatctgctttcttcctgagaaagcctcgttgtgtagtgcccgttccgtcgtagcgcctagctaacatcgtcagatcccaatcccccaatccatcgtcaagttcgaattccaacttcaagtcccctccaaatcaaatctctcgacagaagtctatttcgcctccctaaagttttgtgggccgagctccctccctcggcacatcttctccctcagcccatcccctcctctcgcacatgccgtgcgagtgcgctgagccgagccgagagagagccctctctctcattttcttgctctctctttgttctctctctccccgatttcccgccaacgacacccaagttgccgcgccgcctgttgccgcgcgtgcactgtggtggccgaccggccggtcgccgccgccgtcagccctgcctgttagagtatatggtagttagagtcatattaggatagaattggtttgtttggattccttccatatctgtaatccttccttatcttctccccatgtactcctgtatatattggctccctgagactcaatacaatatgtccaatattcacagtatcctctctccctatattatctaacatggtatcagagcagacgatctagtcgcctctctctcacgcttccgctcgtcgccctcgggagggtttcaatctcctggggcggccaccgtttttttttccttcgcgtcgtcaagtcgatgtcccgagagagatcgatctctcggacgcttgcgtcgtcatcaagcggcagtagcagagtctccggtcatcatcagtctgcacttcgtcctccacctccggtccgccgcctccaccgcccctacctccgatggccaccgtcggcttatcgacctccgccgggctccgcggccgacggacgaccttgtctccgcctcgaccgctgtcttcatcaagctccgccggggggatggaccgacgtcttcaccgcctctccgcctgccttctgcctcgtcgccggcaagacgctgctggtccggcgtctctggcacgggcgcgcggcccgacacctcgccgccaggatctgcaccattgtcgccgcttgcggcctcgacgcctccggactcagctccctcgtcgttgccgccggtcagcccctacgcgtccgcgtctatcttgcctctcgctccctgtattgtttggttgtccgtcactttgctgtgatcttacacgtgattagcaagggagaggagagagagagaagatggttgcagagagcttgttggctggctggctggctgtggagggaaccgattgtgcatgtgtcgctgctgctggtacagttgaggcagagaggttgctggacgtggacttggtctacggaccatttgagcacgtagggctggttgttactgtgctgcttgctgctgcatgtatctttttttttcccgatcagagatcgggtttgcgtcgtccaccgcctcgtcgatatctacgcgtctctgacatcggcatcgacttcgtcgtcctgccccgcgcatcttcggcttgatcacccgttcaagcgtccgactacaacgacttctgtaaccgatcgtcatcgagcatgcgtctacgccatcaagctctgggttgccgctgtgtcgcctccttgggccgcagtgccgctgcctatggtccacacctccattggctattgcaacgctgagaggcgcccttctcagcgtggcctcaccgccggtggacttctcgccgctgcatcgacatggagctgcagctgtgctgtcctctcggaccatagctttgccactttcgtcgtcttcatcgccgttcgcgcatcgacaacctcgtcgtccgcactggtcatagtcagccgctcggggtctccttcctctacttcaagcatcgccgccgcatctccaagctgccactgtcgccactctaggccggtggtgcagctacctctacatggctaccgatgtcgccgtccaggccgttggtcccgctatttcgccttctactttgtccagcatgactcatcgccagcgtcgccgtatcttcctcgactacacttcgctcttctccggcaactgcgtgctgctccggcaattctccctctacgccgttctcgcgctgcgactgtcccagaggccttctctgctagtctcctccgacattggcgtatgattcatggtggtctcctgtctcgcccgcgcggtattggcaacaccggcgcgcgcgtttgtcccgagttgtcccggggtctggcaagccctgtgtaacgtctcgtcctttacggttcgactacattggctcttcggcgtcatcttcctcaacgaccgccgcgattgtatcaccgtcttcgtctccagcgcgtcctcacgcaccattggtccacgatgccctcccgtccatccacgaccactctacgacgccccctgcgccttacggctcgactacctcgacatcatcgacttcccgacttcggctacatcgaccacggctactctacgcacggcttcatcaaccacggctctctcggctccttcgctttggttacatcgactatggcacaaagggctatcatctgtgttgagtactctttccggtttcttctccagtccaagtgtccgcgctgctcacgcttggactgcgggggatgttagagtatatggtagttagagtcatattaggataggattggtttgtttggattccttccatatatgtaattcttccttatcttctccccatgtactcctatatatatcggcccccctgaggctcaatacaatgtgtccaatattcgcagtatcctctctccctatactatctaacactgccgcgcctgtgccgtctgtgcccgcgctgccaccctgtagccgctccgctccacaccgcccctagccgtcatcgccggcgtcatccactccggccccgccctccgtgcgcgtgcgtccaagggatggaggtagagccctgcctcatcgctccttctccctccttcctttcccgttttggcaaggagtgccccccctttctttcttctttttcttctttttcctcccctcgccggcgtcatcctctgtcgccgatttggccgcgtgcgccgagcgccagccgagccatttgactgcccaaggtcggttctcccctcccaaaccgacatcgccatcccaatctctcttgttttcactctccaccgctgtcgcacaccattgtcgtctcgctgtcgccgtccgtcgctgagcgtgccggaggagctggcgcgttcgtggacgcgtgacgtgaactccgcgctcccgcttcatccccttcctcggccaaaacgatcacgtttcgcgccgtgtcctctcttcacggcgccctgtcccgtcgcggtatcccctccgttccccctcctcgctctccctcctccccgtagcacacccgatagctagtaggcgccaccccaagccccgccgccgctcggcatggtctcgccgccattgccgcccgtcgcttgccctcctcggctctgcttcgtccaatccgacgctaggaacgagtcccggtggtcgtgtgtctgctctagcttcaagaaatcgaaccctcgtcgtcacgtcgtgctttccctcttttgccgccgccgacgaacaccgccgcaatccgccgccgtcggaagggcgacacggcggagcgccagtgccggcacgtcgacgcgaagctcgggtggctcgaccacccgagcctatctaggacgagcacgagcatgtccaacgggagagacgaccagtccatctgcttccgcttctttttcgccggcctggctggtgttccacacgcgagagttcgtgcgtgcgtgcgtgcgtgtccgcgatggcctgcacggcgtaatataggtcggcttccgcttgtagtttttgttagtttgctatccaatctccaaatagatgcatactggagtactagtacaattaattttgatgtcgtgtaggaattcatgtttccttttcctgatctacaggccggtgcagattataattggtaggagttactgattgtaggtcttaggtgtgcatacttcttcgcttctttatctcttgtagacttgtactactattaaatcgcttctttatctcggatgatttggaacagaaatcacgagacaacacttgtaggatttctaaaacactgcacaaattcgtataccgaaagatcgatcggccagtcgtccgtcgaaatcatggaggaggcagtcaacgcatctgccgctctggatcccaagcttgctcctctgctgctgttcggccacggcgacgccacgttcctgtacagcgtgccgaagagagcgctgctgccaatgccaacgccaacgagggtgggcgacggcggcgtcgacgacatgatgagaggccaccgctggtggaccacggcgcagggctggttgctcatggcgcgccgcggctcgccgtgcacattcttatgggaccctttcaccggccgccgtgccgggctgccccccgaccacgacggcaccgtcctcgccgccgaaggcagccatcgccggaggtgcctcctgtcatgctgcggtcccatggacccgaccagctgcaccgtgctcgtcatcgacctcgcctacccggagctctggtattgccgccccggcgacaaccagtgggtgaagctccatcaacatccgtaccagtaccgcaaccctgcccaccgtgacgccatcatctggggattacgccagcttacggcgatcgacggcaagttctacaccgaagaactctctggcattgtcggcgtcctcgagttctcgccggaggtggcgttcaccaagatcgccgtacacgacgtcgataggagaccggcggtgtacaagaaacgtactactagcttcgtggaatcaaacggggagctgcactccgttgtcttctctcacccgatcggatgtgaccggattgtcgcgcgtgtaggcgtttacaggttgagcattaatccgacgacaacgcaggagcaaagatcagcagcgtgggtgaaggtggattcgctaggtggtagagcgttcttcgttgagattggcagttttggagcgtcatttgatgcagagggaacatgcttgagagggaattgtgtctactactcggggttcaatggaaaagtattgtgtgtatacgacatggaacgaggaactacggctgtaatcaatcccggcgcacatcttccgtatcaccagttgtagcgcccgttccgtcgtggcgcctagcgggaaaattatctcttaaaaaccctaattgcgaaatttgtttccttgctcgttgtgtagtgtccgtgccatctcagatctcaaatccccgatctatcatcgagttcaattccgaatccaaatccttccaaatcaaattcctccgcaaaagtctagtttgcctcccccggggtcgatgggccgaatccctctcggcccatctccccctccctcccggcgctctctccctttctctctcgctctctctccctcctctccctccgctccgctccgcccgcgcgctgcacgcgcgagcgcgtgagccgcgccgagcgctccccctccgctctgcccgcatgcgcgtgagccgcccgcgccgagcgcccctccccctccgctctgcccgcgcgcgtgcgcgtgagccgcccgcgccgagccgagccctcctcttcgctccctcgctgccgctccccgcgctcgttcgcgcgcgcgcccgcgtggttgccgcccgtgccgcgccgtctacgccgtccgcgtcacccggtcccgctgccctgccgcctgcagccgcgccgccgctcggccccgcagccagcgcgcgtgcccgagccgcgccgctccatccgccgcgcctcccgttgcaagccgcgcgcgcgtgccgagtggccgaccgcctggtcgccgccgtcgtcagcgcctgcccacgcctgtcgcccgtgtcgccgctccactccaaaccgccccgccgtcatcgccgtcgtcatcgcctcggccccgccactccgcgcgcaagccgccaaggaacggaggcagagccctcctccctctgccgcgacgcccccgctcccctcctccttttcccaaagaagaaaggggcgagccccccctttctctccctcctttttccccttttcctcccgccggcgtcatcctccctccgccctgtcgccgattggacgcgagtgccgagcgccagctcgcgccttgaccgcccaagtcggtttccaaaccgacattgccgccctttaaggccccgggcgccctccctctcttctcctcccatcgcctccactccattgttgctgcccctctgtttcgctgtcgccgttcgtcgttgcgcgcgtcggaggaaccggcacaagcgaggacgcggaaggggactccgggcgctcgtcttcctcctcttccccggcccgaggccggagagattactctcgcgccgtcggcctctcgtcacagcgcccctcctcatctcggtagtgcctccctccgttcttcctcctcgctccatctcccccccttagttttcggtagtagctcgagtagcctccccgtagctagccggcgccgccccgaccgttgccgtcgctcgctgtgtgctggccgccgtcgccgcccgagctccgtagcacccgctcgtcgccggcctcgctcggcgtagctccgcccaatccgacgctagcaacggattcccgtggccgcgtagatgctctcaccgccgggatttggcccctcgtgacctcgtcgccgtttcccccttttctttccgccgggtgccgccgccgcaatccgccgccgacggactccctccggcgaatccgagccgttagctcgctccctctcactctccctcgtcatcccggtgtacgccccgtcgcccctcatcatcgcaaggcgtccccgagaaaccgccaccgcccgccgtccattcgcggccgacgccttcgtcttcctcccgccagcccacgtggcagccacgtaggcgccacgtcggcgccagctcgaccgaggtcgggtcgggccgaccccggtcagcccctcccgtgcgcacgttctaccgcgagccgtgaggctgcgcgtgggcccgccgcatccgttcctccgcgaaccgcgcgcgtgcaccgcgtcccagccccgcccgcgcgcgcgcgccgcgtgctcgctccgcacggtgaacggagtcaccgacaagtgggtcccacccgggaccacgcgcggtgagcccggtccaccggctctctctctctcctccctcccgcgcgagcgcgcgccttgggccggccggcccatttagctcggccagaccgccccaattctctcgggccgcgccctagccgcccgagaaaagtctatattccctccctcttttcttttcttttattttcttttcaaaaaggatttaattaaatccttttcctttagaccaaaaatccaataatcttagaaattcaatatcttcccaaccataaatccgtttgactccgttcaacttccaaaattcctcaaatctcgagatctatctaatggcacgcttagaggtcattaatagggctttattttcgccgtttgttgagttgtcccgtttcgcgtgtagtttcggagcccgaagacccgcagtgcgaggatttcgaggatcaagctccagatctcgagcaaggcaagccacctttgaacatcttgagcctatatttgaaatttaattatgttgcttgaaaaatattatgcattgataggaccgcacttaatctgtttgtcccgtctgcaaggcagattggcggacctacctagtttgttgcatttgatccttcctttgttaattgttatatcatgtccccttgtatccatctagttgtgtctcgatattcgtgcaccctgtgcgagtatcgacggacgccttcaaacttaaaatttgaataacaacttgggtaaaacttgggttttacaaaagacttggaaaacccggcacctgggtcggtgcttgcgaactaaatgaatttccaaaaccgcggaccggggaacgtaccgggagtacggtttcccgctcttgcacttaaggaccgtttccttggaatttcatccaaacataagacaagtacgaccatatgggtggaatgggacacccctagctgagtaactagcttatcaggggagccttgatgccgagagacatgtggattcgccgaggtggtgtcggggaggactctgggcttcctggcacagtatggtctgggacctaacctgttgttggtctgggacccctctcgtcggcatatggtaaacctgtgtcggctttggaaatgccttgttatgaaagcttggaggtctcccgatgtggctgattcccacgggctgggtgatccgggttagtaatgtcgtgtgggtaaagtgtaccccctctgcagaggttaacaaactgttcgaacagccgtgcccacggtcatgggcggatgtgaggtgattcctagcgtagttttgtttgactactgcttgtgaaattacggttgtggaaaggggttcgatgtttgaaaaatctgcagctgatgggatcagctaggcccgggtggccgtttgaaagttgttggcccgggtggccgtttgaaaaactgttggccgggtgccaaccttgattcaattctaaagactgatacattgcacatactccgagcggacgagacgcactgtctcatccgtgtcgtttgagaagcactcacttagttgtttttagaaaagagttcaaataaaatcaattgcaaaaacaacagcctttcctcgaagcctgcattaaacacttatttcccatggcttgttgagtactcccgtactcacccttgctctatataaataatcctccccccccagttgctgaagaagatgaagcggaagctgctgatgagtagttcttccaggagcaagccggctacgatgagttttagggtttcggcctagttcccaagtcgcgcctgtgttgtttggtccaagtcctggcttccgtttcccttttgtaatgcagttgtgagctcgggatctgtccgcagcccaacatgactgtacctctactctataataaagagacctctgttgctgtgatattctgtctccctgtgataccagcactgtttcctgggactggtatcgaataacaggttaatttggagcgtcacgggctagttccggtcgggactagttcggggcgtgacaccagtcgcctcaagtattgatgccaacatttcctgcaggatgttacggcagaccaactcgaagtgttgaaagcatctatcaggtagggacaataattctgaaaaatgctaatgaggtaaaagacactaaggtaaataaggtaaagagggatgttcaatttttcgagggtggttgtacctatttgccgatttttattcagaatacgagagtgacaaagcagaaagataagttaataaatcagaagaagagtaagaggtccatggctggaatacctccttgtcgaggcgaaggggcaagcagccccaaaacgaaaaactcataccgtggttgtggctttcccttggaggcgctcaaacgtctcctgggtacgaagaagtaggagtgcactacatggaggatccaacttacctttttatgccaactcgatgagtgtgtttttagttaactcattcatttagaatatgcagtaatgttagctcggctatatgacgtctattaatttcattaagttttggccactactaagtgattgggagctctttttctctgtaactttatgaaaccaaaccttctcgttgcattaagagaatgatttggtaaattttctttgataaaataagttagaaaatattaaaattaattatgaccttttgtttttccaaatatttgttaatttggcaataatttattcaaattcagtaaaagaatgtgttaaaatttcaaaaattttcgtttggagtggtgcctaccgaaattttctagctttttagaaagaaaaaatcctgcttatacccggttttagaattgagggccgcaattgaaactcgacctcctccataagagacggaagtggacttttccaactgaaaagcatttcctgcctgaaaccggagagtgagagtcagagactcgttgttctaaaaaaaagttctgaaaaaaaagtgagagaccctcaatccctccccaaccggaacacccactccgacgagaacgacatggacgccggcggcgaggaggagaagcaggagcgccaccgggttgatggtgcttcgccttccatggtcgccctccgctccgacgtcctccacgccgtacggcaccgcaccgccgtctctctccctctctctctctccatccatcggccggctccccgcctgcacgccggtagctgacgtgttttggtttttcttttcttttctttttttatgcggggttggctgccggacgacgcgctgctggccgagacgcgcgccgcggatcgacgggtcgtgttactcttattgctcagaaaattaggtttgcccgttgctgttcttatggctgtaggcaactcaagtctatgtggggataaattttgtgacaactcaagtctttgctacgattcgtttgcctaaacgaacaggtgtaattgggcttgtagaaaagcaatatgccaatatagattcctaaggatcacaattcacaacttcccaaccaatataaaaatttctgcaccctcgtcaccaaggataaaacccaatgtgaactaatgtgaaggaaagtcgagatatagaacttcattagagcgtaaatagtatcctttggttccagacatcaacacatgcccttttagctggtcgcatatatcttccgtgctgctctccgcatttgttctgtatctaatgtttcagttactagcaagtttgataagaatcattgcttcctctgaaagtaattatttttcatgtatcaagaattgctgacgctgaagagaatttgggtgaggttgaagtgcgtgaggcccatatagccaaatccttgtacttcataagggttggggagaaggtataaatctgtatatctctatactttaccctgtgacctggttgacaaagtacatgctcgaaatttagctacttcagtgacaggggacctcctgttgcaggtccttggagggaagtctcataatcaggacacttctgaattggtcacactggtatgaaagagtttcatctatcatgtcaagttaaatcagggaaatcttgtaaatcgcgtcttggaaaaactaaagatttgcagtcggagtggtccaaaaacaaatttcctttgtatgcttatgctgctgcttttatgttcctagtcatgcaagaatatgataaaagatcacatggtattgacttcctcaatcgggactttgttgtccgaggtaaattgatatacatgctcggtgtctgtatgaagtgcatggcaatgcatccggaagcatcagctgttgccccaggtcttcttgatatgatcagatctaggtatgccaagcctaaacaaacatttccctgttaaggaattttattggtaagttaccattttgacatcaaattttgttctacagagctgtttgacaacatcctgaagcatatgtcagaaggtctgtgttgtttgcagcttcttgcatattgatagcgctgcacctgttgtatgtctcatcagctcttatagaaggaaatcaggacattctacatacacatatgggttcttcatgttgcagaagctgatcctgatacagaatgcacatatcagtatgtattttggtcactattggggggggggggggggaattatagtacaataggctcagcacataatactaacagggttatttttcaaccaacaaagtacaggttttcagggtaaactttatatcaaattcatttgcgtcgcctttaattttatcctgaaggaagagtgctttcaccctgagatgattcaccatctgaaaaataaaaagctaataactcccaccttatgctttagtttcctgtgacatacttctttctatcattcctttaagtcttctacttcaaccagtgatccagctcttttcagtaatgtgtagagaaaattcggactcttttttttcaaaaaaaaaaacgtataatgagaaaccatttcagtacgctggaactcagtaacttctcacaatgtcatctaactcctccattggcatgtctgtctccttgcaggccattatgacctgtttgcaacttcgttctgagatcttcagacatcacaagcactgaatcggtggatcacagcatggccagcagctgcaggtctctgccttttaagcttgataccatcaatgtactggattagaaatataaatcgatcaatgtatttgggattcagagtgctacatttttcgtcatttatacatagaacatgaattcccaacatgaattgatttatgtgaaacgtctgttccagattactactatgtttgaaaactttgaactgattagttgagcaaaagaaaattactacatgtgaacgggtcttgcagggcgagaggaggaggaggaaggtgcatgctccatggtgaccaccagccacaggacagggcactcccggagcgttggattagccgcgagggacgatccaacggccgagatgcgtctggtgcaggtatttaagcgcaatgctgcttttccttgcgcttggctggctgcacaaccacttttctgcttctccctctctcacacattctcatctcaagagcagtagcggcgaaagatgaaggacaaatgttatatcgaattccgtctgcattgcctttgattttagtttgaaagaatggataatttcactgtgatatgattcacaatctgaaaaataaagagctaatgtcactcatcatatgctttagttttcagtaacctactccttcctctcattcctttagtctaatattatactcattcagtgatccagatcttttcagcaatttgtaaagaaaaacaggacttctttttatcgtataaagagaaaccaatcaagctggaaactcaataacattttacagtgtcatctgactcttccattggcatgtttgtcttgtagatgggtatgtgctgcctgcggctccattctgagatggcccttcagacatcacgagcactggaatcggcggatcacagcaaagccagcggaagcaggtctctctaccttctaagcttgataatatcatcataccattttgcgaacatgatgtgaatcgatgtactagattaagttgtaaataaacatatacttatcttgccatgtaaattcctgctcagctagttctgcttaggcttgatcatatcgtattacaggcaggggcggatccaggaacaaaagattgggggagttcaattacacagtttcttcaaccttgagccatttagggactttttagtttatcatttatggtgaaaaaatcgaacggggtactccggagggtatccatgggttttgtgggtgtaggggggacttgagtcccccctgcacccacgttggatccgcccctgattacaggattttttttttaatctgagatttgaaatactagaattttcgtcagtcatacaaaagaacatgatcgtgttgaaattgtatggaagtcatcctgatccagcttgtgtgtgaaaattatacgaagcttctactctgtcaaaagaaagaaaaaaaataaactcctagctacgaatctagacatattgtaggtgggattggttttttttttaagggtagttgaaaatttacatgtggatggatcatgcagggggagggatccgtggggaccaccagccacaggatgggggcactcctcgagcgttggatcagccgcgagggacgaaccgacggaggagatacgtccgtgcagggggagcgatctgtggggaccaccagccacaggatgggggcactcctcgacgttggatcagccgtcgacgatccaggtatttaagcacaactatttgcgcttcgcagcacaaccacttttccgcatctctcctctctctctctctctcgggggtgtcaagagcgcagcggcgaaaggtgggaggtgagatctctctctcacttcatcctcccctcctcttctgtggtttcgtccgccgcctccatccctaaaccctacttctccgaaagcgccgtgagattcttctccctactcttcttcgatcttgctccattggtggtggtgatgtttgtttgcttggtgtttcgtgtcgcggtcctctcgttcttgtcttcgctgagtggcattgatcgagcggcaccgcgcgtcgaactcttgcttgaatctggaggcgtttcgtcgatccttttgtttttcgtttcgtgttcttggcttcttgtacccgtgatgttgacatgttgttgcctgatgcatttgaggcgtggttttcttagagttggatgaggaggttgacgagcaccgaagcttcatggtgatctcgttcgcctctcctcagaacacgttggtcttgatcttgccttccgtttctctatttctaccagtgcaagctcgagaaattaaaccacatcaattcgtttttccattggtggtggtgtttgtttgcttggtgtttcgtgtcgcggttctctcgttcttatcttcgctgagtggcattgatcgagcgacatccgaaatcttgcttgaatctggaggcgtctcgtcatccgaaacttgaacctctttaccgccctctgatcctctctattttttttcgtgttcttggcttcctgtacccgtgatgttgttgcttgatgcatttgaggcgtggttttttttggagtcggatgaggaggttgacgagcaccggaacttcatggtggtctccgttcgcctctctcccatcggaacttcatggaggttgatcttgatggttcctggcgcgaccagtgcgtgcgcgagaagttagacgccatgaattcgtttctcttctctgcttttttttttcgcttctgttttggtgtgttgcggaggtgtcactttctgaatttgtatcaaccaaattatttttgctgttcctgatgcaatacgttatacgcccgtcttccttacgactgatcaagtagcaccgcgccttgttctcttctcgtctcgaatcttaaggcgtttcggaatccgaattttctacgatttttcttggccgtgtttggtatcgcggttctctggttcgatcatgtcttcgctgtgtggcatttgatcgagcagcaaccgcgtctcgacctctctttgaatcttgaggcgtttcggcacccgaaacttggggcaaggttcacagcggtttgatcttttttttttccctcttgttcttggtttcccgtacccgtgcttttgttgctttgatggttttgaagtttgaggttgggtgtggttttcttcgagttggaggagaaggttgatgagcgccgaagcttcatggtgatctccgttcgcttctctccttggaacacgttggtcttgatcttgctgtgtgtgtctcaaagactacaccagtgcgtgcgcgaagaattcgtttgtcttctctgcttgtatttttcagtttgttctgttaattttggtgtgttgcgggagttcagtttctgagaatttattaaccagatgccgccatcggccttcttgttcttttggctgttcctgatgcaggatgctttttctctatgtgtctctctgacgtgttctcttggtttagtttctgtttggaaagaactccatgttctgttcatacaatgatttctgcatgtgtagcttggttaaactgcttgttgtttttttcccttttcgatgagaaatcttctgactctttgcatatcaaagaagctttcatctcttgaatcttagatttgggatccttctaagcccaacggttttggttctgcgagattgtacaatttcttcatgtttgttacctatattttacttctcggtgacgctgtcatgttgtattctccttgctgaattctactataagtgcacgctgctgtctctgtttttcttcttctgttcacttcatactctgtttcgaattattgaagttttaatacaccaaagaggtggccatatcgggaggaaatttattgtccttgtacaatacgccttttctgtttgtttcctcttcatttcactttggaatttggtgttatgatttgtgtcagaaaagcttatatggcgttcttacaaaaccttgtatgcattttgttcacagtaatattttattttaattcttccttgcttgattcttgtataagatataagattaatgtgtataattactgcagcattgcaactgaagattgatgatctcatgttatatgtctcaaaaatgcatttaggggccctgataaatagtgtcatatcatgttatgtctagttgactccttttcgtgtttttacgaaagctcttatgtatttaattgatctgtagtgttttgtaattgtattcactttactctttctccatatttgtcaataaagttattgtatatttgtattcatgttataaattttcagcaaaacaaaggtctgctatgggtaacagccttcctgtagaatcaaagttcactgatgaaaaagagaatgacagaattaagtatgttgtgtcgtctatgcaaggatggggtgagaaaatggaagatgctgtgagtaaacttgcagccttttgtatgacaaaaaaaaggatagttctgcaaaaatttcttactgatctgtaagtaattgtgtaaaatactgtgactgacatatgccctctatattctctagcatgcagctattctaaatcttgatgataccatgacgtcattctttggtgtttatgatggccatggaggtttgatcttcattctcctttttttttggtttcaaatcctccatattgtcggcataactgtttacatcatgctttgtttgtctttgtgtgtcatgtgtttatctatgtgcatgtttcgagaactttactgtttatgctgaaacttttacctgtcaattttcaaataaatattaagctacagttctggataatgagccaagtttgctaattagtactaatcacctatgtgcggtgtgctttctaggataacatgaactgcgtaaacagaatattaatttacgagggataaaacactgcatgggtgtgagttaatattaacagtcatgataattaaaaggatagccactgatgaacatgttggttaatttatgtgtggtgctatttttcttatgatacctatgaagtgctgatctgctgtgttcatcacattgttttgctttataagcttctatatgcacataggagtaatcttgagccaccattctgagttgtttattttctatctcaggagctgaagtagcatcatattgtgcaaaacgatttcatattgagctttgcaatcatgaagactacgacagcaatctaagtaatgcgatgaggagtgcgttttacaggttattttcgcctagtctatatcattttgttgcactgaatgatgctgcacttgcaaatttggaatttcattgttcctgtgtaatttctgcagcatggatgaggacctgcaactgtccgatgcttggagggagttagttattcctcgtaataatggatggatgtattttctcaaggctgcagcttgtacaagcatttgcaaggtatcttttaaaccctgaacgtcttttaatatccatatattgaaggtactcaaaactgtatttgttggacagtgcatattgtatctatgaaaaaggaaatggaagaatgtgtgtgatatcgagactattgttctttcttgagatgtactttggagttggaagagatatgtttaaccctaaccttgactaattgctcctattaaaaaaggttcagttagttacatatcaattgtctggtttactgcgttggaggccaacaggttcttaagttcacattgcaccttggttcttatcatactgtggtactaccctaaattgaggtattgtttgcggcatctcttctatggtaatctctttcatacactggtttggctttcagaaatgtttttctttgtctggtggctttggtgagctatttcttgcttgacttgtatttctaactatgttgggattccctattatgtcctccaattcatttcttctttttccaggcaacttatactgagccagcatatgaagggagcacagcatgtgtggttgtcatcagaggtaaccaattgattgttggacatgctggtgattctcgttgtgtactctcaagaaatggtcaggtatagtgactatttccttttcgaatttcttgttggtacctaatttgcatgttctcttattttggtgcctaacatttgtgcttgtttctgttgtgtcaaaaggccagtgcattatccgtcgatcataaaccagacagtgagtctgaaagagagagagttcagaatgcaggaggagtagctgttgggcatagttatcgtaaaataatggggaggtgggtaaccaagaaacaatggggctttactgattttaagggaagagtatcaatctcaagatcaattggtatagtcttgcctggatctgtttttcgtttattgcagataatagcaccgaaaaaaaacatattatgttgtgatttgctgatgtgttttacccacttacatttcaggggactttgcttgcaagaagaacgaacgtttacctcctgaagatcaaatgctgacatgtaatccggacatcctgactgtaagtgccactatgtttgtttagtatttggttgaatatgaagtttgtgctgctttgtggggtctgatggaaaatccccctttctgcgtcagatggacataactgatgacatggagtttcttgtgatagcaactgaaggcctctggtaaattttgaacaaaaaataactgacaataattattatttgatcattttgatgtcactagtactctttgtgatgctgttttctttctcctgctgatgcatatatagtttcatttatagttgcatacctactgtactatgttttttccatgcaggtgcaacatgacaaatcaaaatgtggttgatcacacacatgaccgtcttttggtgagtccttttcttttgctcagtttgtcttcttggcaggacaagagatctcctactgtaatagcaaaaatattttgtgtcaaattctaggaaatgacttcactcaggcaatataaagcatccgattttttaaaaaagaaaaaaacaagtgctaataagtacactgtcatctgctttgtgattgttcgattcttttgttgttaaaactgctgttccttttgccttgatcaatattgctgtgactaatatcttgcatgtttacgtcaaaaaaatatcttgcatgctcgattgtttcgttgttaaaactgttgttccttttgctgtggccaaatattgctgacttgctgtgaccaattaatatcgctatgcaggagggtgcagaagcgcgtgtcatctgtgaggagcttgttcagtttggcttgccatcgggcgacaacacgaccgtcatcctggttctgttcaagcccggcgcctaccctgctgttccgccggtcgacaccgacactgacactgacagccacaccggcgatgatgtcgacaacaacgaccccgccaacgaggttgatcccactgccaatgccgggtctgatgacagcaacaccagcgatgaggtcaaggtcgacgccactgccactgccgtcggcagcagcagtaccaccgccgtggctgccgacgaagccaccgtggtgtcgttgtcgactgcaaccatcaccattgtggacaactacttcttcattaacaccagcgaggaggttgatcccactgccaatgccgggtctgacgacagcaacaccggcgacgaggtcaaggtcgacgccactgccagttccggtctttccgattgggaacttatatattctgaattctgatcctgttagtggtagacgagtaatagcaccgacccgttgatagtagtagtttggttgtgctactttgctagactgagacaccttgaattaattgtttacgaatcatctctagcctttttagttctgaaggtgattgatctagtgatgcttttgttgatcttcattttgaatctctgtgcatggtagtggtttatgaactactagtagtatttttcccagtttccttttgaccaaagttttcttcattcttctagtctctgtgactgtgatactcaaaatcttttctcgggaatctgtaactaggattaaggcacgaaaattttctctcctttttttcaagagatatcctgaatttgcgacctctctcttccgccttccccgcgcggggggtaaaaaaaaacagaaagttagaaaaaattatgtataaaaaatttgaattcaaattcaaatttgaatcaggtatgtaaacttttgacttataaactttggatctataaagtttagatgtatagaaatactatatatagaaaatatttgaattcaaattcaaatttgaatcgggtatataaactttaggtctataaactttagatgtatagaaatactatatatgaaaaatatttgaatttaaattcaaatttaaatcagatctaattcaaatttaaatttgaatcggatatatgaactttaggtctatgaactttaggtgtataaactttagatgtatagaaatactatatataaaaatatttgaattcaaattcaaatttgaatcggatatataaacttttagcaaaaaaaactttagatatgtaaacttgaggtgtataaactttaggtgtataaatttactaaaataggaaagtaatatggtgaaaaaaaaaataaattaggtggagggagggagggagaggagggggaaatctaatcgccctgggcgatcgctcagtagcatttccgttccccgcgttcacttgcccacccgtccgcttgatcgtgcgggaaaccaacaggcaacagcgatgcaggagggagttctatgtattgggtactgttgaatttgattccaaaattgaatctcaaaattcaggtttccaattaaatatcccttcctatgaatccttgccatctacttctcccaattccaaaaatatcgaattcatattcacgctcccatcggatggcctaatcagtcaaagaaaaagccaaatgttaaattttcaaacttaattttaagatattttcaacgtagtttctttttcaccattggtttttaagtcataaaaacacgtatataaaagttttatctataaattcatttttatttcctaataagccgtaggaaaaaagccaaccgatggggacctcagtttaccttcttgactccttgttgaacccttgagttcaaatatccaatttgaattcaagtccaaatcaaaccagaccccaaatttcttcaaataatttcctggaaaatggtcaaacattttcccctctggtgggctgcctctcctttctttttagataatggaaatggattgcatctccggcttctgtcataagacacacagccataaatttaatagtaataaaaatgtaagataaaagtaaatcaaaatgagaaataaggtgatgggacaaatccccaactcccctttattattgactaatgttaaaccacataaaatattttagctagcaattcttatgaaactacgccacccatagtggaataagagacccttggctaccgattccaagagtgtagcaccattgcgcatagtatcctgctcctcttgtggtagcattgtagaccataagtggagccagtaggaagacatgaagataacctgcatagggttagataattgtttaccattaaaaactttatcattgcgacaacgccaaattgaccaacatacagcgctagctccaattagaatcatcttcttaatggacctagatacccctctaagccaattatcgaaaatgtttttggcgttacggggtggggggatattaaaaacaaaaaacacacatctccaaaaacaaactgagcaacatgacactcaaagaaaagatgttggattgtctcttgtgtatagcagaaagaacaatgtttgtctccgccccctccaattttcttttacccaggttatctttcgttagaaatactttcttgtgaagaaactacataaagaccttgatctccagtggaattttcaagtcccacagaattctctttttgatccgaacattacagttcatgatcgcgacatacatagatttgacggaaaattgaccattcttatagagcgaccatacaaagcagtccttttcatttgacagagttatattagctagcctgaggatcaaatcgttccactcgattagctagcctctcctttctatgtggaaaaagtacattgaaggtccctcgacttgtcatcgagttacaaaatcatccctcacccgtaaaatcagatatatgacatccttcaacttacaaaatcgttcattttagatcctttagtagttttgttctggttttatttgacatggcggctgagtcagcgtgggacccacgtgagccccacatttctggatgccacgtctcttcctcaccagtcaacgaggttttttcctatatgccattaagaaagatggtgcctgcttctgtgccactaaaaagtttaagcctccctctctgccatcgttaaactttatcgtgccctccacactattccgtctgtttttgttgtaacggtgggtaatggcgcagtaaaatgacttagttgccctttggtccaatatgctctctcctagcactctcctctctcccctcagatgcagcagcagcagccaaggagcggaggggagaagacggcggcactgcgacagcgacggggcgctgcgacgacgacgatgacgacgggggcagcgctgcgacggcggcggcggcggcattgctgcgacgacgacggtggcggcatcgctgcgcgacgaagacggcggcaacaacgctgcgacgacgacgacgacgaagacgggggcggcgctgcgacgacagcggcggcggcagtgctgcgcgacgacgggggcggcagcgctgcgacaacaacgacgacgaccaacacaactatggctgcgaggactattgatacttgctactggtgttcatgactgttgatgcttgctactagtaatgcttgctactagtgatgccaggaccagcacaacgacggccgacggcggcgaggactattgatgcttgctactagtgatgccagcgacctcgcctgatcagccgcgcggcacatccaggaagccatcagacccacccagctcgaccgaaaaaattcgcaagaaccacagctcacagccacaggaccaagtgtccgtcctaatttccgcgaagacgagtgcgagagattgcttactcgggccgccgaaggggatgggtccggggttgagcccggcggcgatgctcggcggcggctggacgtggagcacgacgagcgcgccgtcagggcggaggcggaggttgtcggccggaggtcctcgccgctcgtgttgacgccggcttgcatctgcgtcagcggcggaggcggagccgccaccgcaacgtggactggttcgttgaactccatgcggatccacggcatggtgaagctggaggagccggttggaccgaggttgaggaacagcgcaccgacgacgaggatcaggacgacgacgaccgggccgaggcgacggcggcgcggtgccccagctgggcggcggcctgaccgcctgagggagaagaggggaatcgagggagaagactgagtgaaagggcaagagcgacattttttctacccgggcccatatgtcagagctgccaaatagttaaatctaaacggaatagcaacggaacggtgtggagggcgcgataaaattcgacaatggtataaagggagggctcaaatattttagtggcacagggacatatagggccattttggtttgatgccaattcttgccctaccaattctttggtagttttgaatagtacatgttagcattttggattggagccaaattttgccaaatcaatagagtggagccaaatctgtactataaaaaatttgttagtgccaaaatgtgcctaaggtttggtactaccaatattttggtagggtttcaaaccaaacaagcccatactatctttcttaattgcacacggggaagagcctcccagtcaccacgtctcttcctctctcttctctagtcgtcctgtcgaggagcatagccgacaggggaggagggccgcgcccggtgggcgcgccggcgcccgggggggggggggggtgggggggcggagcgcggcggagaggagggttcgtgcgacggggagcggtcggaggccggcgaggaagaaggccctctcccggagcgcacgggagaatcgcgccttgactagcctcttcgcctccatcccactgctgcgcatgtcggcggcggcggcggcagcaggtcacgaaggcagcgaggatggagtcggcggacggggaggacggggagaagcgcggcggcggcgctcggtggcgaagatgggcggcagctgggggagatggagcagccatcttgtggctctgggcctctggcgtagactcaccatgtgcatcagtttggtcatcttgttcgtctttgtttgatggtgatggatcatccccttcaatcaagtatccctcctcatttgtagtctcgtttattgagtagcccctttcagctggatcagcagtgccaagatttgctaaacctgacgctaggcctgaaataggagtatcagcagattcccctgtatccatagacagaatctcatcaccagtatcaaacaggccttctctaaccaaagaagaatagatgtcatgaggattggcatctgcactttgcaagcttgcaaaaagtcctgtctgttcagagttatcttcttgtgctgatcttccactcggtgcttcacttgtccctgtcagcgtaacttggtcctagaatttcagatttattaactgaaaatttgttgaatttcagtcattagctggatcatttgctaaatttcagtcattcattgaaacttttgctgaatttcagagtcaccaacttggcacaatctctgaaacttttgctgaatttcagattctttgactgaaacttctgtatctcttttgctcttttttagattcgtttactttggcgtcattttctctggaactttgcctagtgttagagtaactaacttgatagcgccatttttttttctggaactttatctgaaatactaacttcttgttgcatttacctggaacaaccaaacaggttacatatctcagacagtgaaattggaagctctgggcattccagcatacagatcattttctttggttgagctcgaagcggcgactaatgacttcgaagttgatggggagaggcggggaacgcggcggagacactgaagttgatgtggccctcccgggcgaggaacccgtgcgccgcggcgacaaggttgtcgtagctggcggcgacggtctcctgcacgcgcgcgtggggaagcggcacttgcgtgtctccgccgccgccctccccttctcccacgttgcagctgccaccgcctctccgccagcgcgctcgcccgccaacgccgcctcgccctaccgacgccctccccttctcccgtgtctccgccaccgcgtcgccgccgccgccacatcaccggccggctgtcggacctcctcgcctcggcgacctcctccccaccaccggctggcctgccagagagaagagtgagtgagagagagagagagagaggaggaagggacaggccggcctgctgatgtggcttgctgacgtggcattctgacatataaggcccacactgactcagtcgccacgtcggatctagtttttactggtttataagttagggggtgtgttatatctggtttttcggttggtggatgattttgtaactggatgacaagttgagggaccttcggtgtactttttcctttctatgtcgacccagcccagcgctcggtcacggcccagcaaccgcacgcgtcgcgcatgtgccggtgcggacggggacggcgctcccgctccaccgccgcgccgctcgccgtttcccccgcgcgcgcgtcacccctctgtccgccgcgaccgttttgccgccaaaccagagcaagctcgccgcttttgccttcctcttctccgaccccggtgcccgtggcgccactccttggttcacgccgaggccgaacgaccgtcatctcgccacggcgccccttggcatcgttaagccatgtccttccctcttccactcatactaacaccgggtgctagaattcttctctccttcctgccgtagcttgtcgctcgcttgctctctctgtgccgccgccgccgccttgattgataggaacggcatcttgaatccttagccgcgctgaatcgatctctgtcagcggaaacatgcaaacttagtcactcagctgatgactaagtttagctgatgacgagggcacggctcctgacgacagcccgtagatgcatgattcatgattcaggaggaggtcaccggttcactacagttccactcaattttgatgtccaagacggagatgatgtgtgatgatgcactgcatctgcatgcgacggatgatactgatcatacacgaagctcgggtggctcgacccaggacgagcacgagcatgtccaacgggagagacgaccagtccggcagttgtcccagctgcgccgccgtcgtcgcagcggccgcctctgtgattggagattggagaatctcgagagttcgggcacgcgtgtgacctgcatggcgtgctgcgttctgtgctgcactgcttcttcggaaacgtgtttccaccggactcgcatcacatataggtcagcttccgcttgtaatagtttgtaccccacccggttggtttttgtcggttgcatagtaatgtggaggatccgtctctatgccgtgccaaaaaactgatttaccggcggtgcagattataattggtttgaattttgatgccgtacgtgtaggaattcatgtttccttttcctgatttacttacatgggcgctgcagatttaggcgtgcagatttcttcgtttctctttcctatatgccaatatatatatatactagttctcaaagcctctcggatgatttcgaacagaaatcacgagacaacacttaaatcgggctgccacaaactctcctcgtttataaagcatagcacagattgaccggccgtctcctacgaaggattaattaccgaaagatcgatcggccagccgtccgttgaaatcatggaggaggcagtcgacgcatctgccgctctggatcccaagcttgctcctctgctgctgttcggcggccacggcgacgccacgttcctctacagcgtgccgaagagagcgctgctggcgccaacgccaacgccaacgagggtgggcgacggcggcgtcgacgacatgatgagaggccaccgctggtgggccacggcgcagggctggttgctcatggcgcaccgcggctcgccgtgcactttcctatgggaccctttcaccggccgccgtgtcgggctgccccccgaccacgacggcaccgtcctcgccgccgaaggcagccatctccggaggtgcctcctctcatgctgcggtcccatggacccgaccagctgtgtcgtggtcgtcatcgacctcgccgacacggagctctggtattgccgccccggcgacaaccactgggtgaggctccatcagcatccgtaccagcacagcaacactgagcaccgtgacgtcatcatcaggtttttacgccagtttacggcgatcgacggcaagttctacagcgaactcctcatcggcgatgacgggcttgtcggcgtcctcgagttctcgccggagctgacgctcaccaagatcgccgtacacggcgtcgacgacgacaggagaccaacggtgtacaagaaacgcaccacttgcttcgtggaatcaaacggggagctgcactccgttgtcttctctcacccgatcggatgtgaccggattgtcgcgcgtgtaggcgtttacaggttgagcattaatctgacgacaacgcaggggcaaagatcagcagcgtgggtgaaggtggattcgctaggtggcagagcgttcttcgttaagataggcagttttggagcgtcacttgatacggagggaacgggcttgagagggaactgcgtctactactcggggttcaatgggaaagtgttgtgtgtatacgacatggaacgaggaactacggttgtaatcgatcccggcacaaatcttccgtatcaccagtcgcctcaagtattgatgccaacattttctggatatcatggcggaacaactcgaagtgttgaaaatatctatcaggtagggccaacaattatggaaaatgcttatgaggtaaaagacactaaggtgagtaaggtgaagagggttgttcgatttttcgaggatggttgtacctgtttgccgattcctattcagaatacgagagtgacaaagcagaaagataagttaataaatcagaagaagagtaagcggtctacggctggaagacctccttatcgaggcgaaggggcaagcagccctgaaacgaagaactcataccatggttgtggctttcccttggagccgctcaaacgtcttctaggtatgaagaagtaggagcgcactacatggaggatcgaacttgaatttttatgccaactcaatgagggctttttaattaactcattctttcagaatttgcagtaatgatagctcggctatatcatgtctattaatttcattaagttttgttctctactatgtgattgggagcactttttctttgaaactttatgaaaccttctcgcgttgcattaagagaatgatttggtaaattttctttgacaaaataagttataaaatattaaaattaattttgaatttttgctttttccaaatatttgtgaatttggtgtttatttattcaaatttagtaaaaaaaatgtgttaaaatttcaaaatattttgttcggaatggtgcctaccgaattttttttgctttccgaaaagaaaccctgcttatacctggttttagaattgggcgacgcgattgaaactctacctcgtacataagggacgtggagagaactttttcgaactgaaaagcatttcgtggctgaaaccggcccatggcctctttcagttcggctcggcagtcggcaacagcaagagagtgagagactcgttgttctcaaaaaaaaaaaatgttctgaaaaaagtgagagactcgtcagtgaccggcacgacatggacgccggcggcgaggaggcgaagcaggagcgccacctggttgctcgtgccggcccgcaagctcttcctcctctcccatcccgacgccgacgacgacctcgccggccatggtcgccctccgctccgacgtcctccacgccgtcaaatccgccgtctctctccatctatccatcggccggctccccgcctgcacgccgcggtcgagtcgctggccgccggactacgcgcgcgcggatcgacgaggaggtccgcaagctcgacgggaagtgagtgggttcttcctcccctcaattttggcatcatgttactcttattgcggtattgcccagaaaattaggtttgcccgttgctgttcttatagctgtaggctgtagcactctctatgtggggataaattttgtgacaactcaagtctttgctacgatacgttttcctcaacgaaccttaggttaggtaattaggttactttggggaacttgtcgatcacttgcatttgactggatatatgtaatttatgaattatgtttcagaatggggtcggtatgtattgtatgaggttcctcttgagagagtttgcataccaagtgcctaattctgtcttcagtatattgccagtgttcgtgtatcttgattccaggctcacagatgtgcatcaatgcatgctttggttcattgttacaagatgtaattgggcttgtagaaaagcaatatagattcctaaggatcacaattcacaacttcccaaccaatataaaagtaatttatgcaccctcctcaccaaggaaaaaaacccaatgtaaactaatgtgaaggaaaatcaagatatataacttcactagagcataaatagtataattgtggttccagtcatcaacacatccccttttagctggtcacatatatcttccgttctgctctccgcatttgttctgtatctaatgtttcagttactagcaagtttgacaagaatcattgcttcctctgaaagtaattttttttcatgtatcaaggattgctgacgctgaagagaatttgggtgggattgaagtgcgtgaggcccatctagctgaatccttgtacttcataagtgtcaggcagaaggtataaatctgtatttttctatactttaccctgtggtctggttgacatagtacatgctcgaaatttagctacttcagggacaggggacctcctgtcctgttgcaggtccttggagggaagtcttagaatcaggacacttctgaattgttcacactggtatgaaagaggaggttccatctagatcatgtcaagttaaatacttaaatcaggaaaatctcgtaaatggggtcttggaaaagctaaagatttgcagtcggagtggtcaaaaaatagatttcctttgtatgcttttggtttatgctgctgcttttatgctcccactcatgcaatgatatgataaaagatcacatggtaatatggtatcgatttgctcagtcgctactttgttgtcctaggtaaattgtatgcatgcttggcgtctgtatgaagtgcatgacaatgcatccggaagcatcagctgttgccacagctattcttgatacaataagatctgggtactccaagcctaaacagacatttcctgtgttaaggaactttattagttaggtacaattttgacattaacttttgtttcaacagagctgtttcacaacatcctgaagcatatgtcagaaggtctatgtgttgtttgcaacttcttgcaaattgatagcgctgcacctgatgtatgtctcatcagttcttatagaaagaaatcaggacattccaactggtttggaattgatatgcatatgggctcttcatgttgcagaagctgatcctgatacataatgcatatcagtaagtattctggtcactatggggggatatatctgttatggatcactagtttgtattttgttcgtcaacgtagagagcaattatggtattggctgagcgcacaatattaatagggtcatttttcaaccaacaaagaaatacaggtgttcagcgtaaacgttatacaatatctcattttcatctactttgattttagcctgaaagaagagcaattttactgcgagatgatttcactatctgaaaataaagagcaaataactcccacattatgtttggcccctttgtatcgcaggaatggaaaaacggaggaataggaaaaacgtaggattctgacaggaatgcaggtgtaaaacagaggattggaaaatacaggaaaaacacaggaataaccgtttgattggaccacaggaaaaacgcaagaatcggatgagagagatagactcaaagaaatttttccaagaggttggacctcttgctaactttccttcaaaatctctataggattagccattccataggaattttgaaggatagtataggattcaatcctttgtttcaaaggctttcataggaattttttccaaagggttgaaatctttcaaattttgaacacttttcctacaaatcaaaggcaaaggggcccttagtttcctgtaacgtacttactctatcattccttttttactcataaagagagcccatttcagtaagctccttttttactcataaagagagcccatttcagtaagctggaaattcagtaacctctcacaattcaatctaactcctccattggcttgtttgtctctttgcaggccaacatgaccagtttgcagctctattccgagatcttcagaaatcacgagcactggaatcggtggatcacaattcataccaaggccaggccagcagcagcagcagcaggtctctgccttgtaagctttgataccatcatacattcgcgaacttgatgatcaatgtactggattagaaatataaattcgatcaatgtatgataatttgatcaacgaatatatagttttgtgataatttgatcagcttccctctcacacccctccctctctaatagttgggtcccactgatttttttaaaaaaatattgatttgattgtcacgtaggaacaaagccactccggcttctgcactatgtgaggttggtggcgtgggtggcggcgcggctgtcaggaagcggcagctcgcgtcggtggcgcggagagagaggcctatgcgtcgagaagaagagacagaagcgagactgtgggccccacatgtcagctgtgggatgtgcataacggacaccacagctatagttgcaaatgcaatgtgggtcatgcagggcgagaggaggagggcgcgtgctccgtggggaccaccagacacgggcggtgcactcctcgagcgttggatcagccgcgagagacgatccgacagccgagatgcgtccggttcaggtatttaagcgcgatgctttcttctccttgcgcttcgctgcacaaccacttttccgcatctctctcctctctctctctctctctctgtctctctcgcaacgtactcatctcaagagcagtagcggcgaaaggtgcgaggtgagttgtgagattctcctcctcctccatccctaaaccctacgtcctcccaaagcgccgtgagattcttctccctttccttcgatctcgctcttctggtggtgttctccctctcctcctggtggtgtggtttctgcgtgcttgggtgtttgggggcgtcgcggttttttctggttcgatcatgtctttcgctgttgtggcatttgatcgagcagcaaccgcgtcttgacctctctttgaatcttgaggcgtttcgtcatccgaaacttggggcaaggatcacagctgtttgatctttttttccctctcttgtaggcttcccgtaccgtgcttttgttgcttcgatggttttgaagtttgaggtggagtgtggttttctgagttggaggaggaggctgatgagcaccgaagcttcatggtgtattgatcttgctgtgtgtgtctcaaagtctctaccagtgcgtgcgcaaaaaattagaccacgtcaattcgtttctcttgtctgcttgtattttccagtttgttcagttaattttggtgtgttgcgggagttcagtttctgaaaatttattaaccagatgccgccttcggccttcttgttcttttcgctgttcctgatgcaggatgcttcttctctatgtgtctctctgacgtgttctcttggtttagtttctgtttggaaagaactccatgttctctctgacgtgttatcttggtttagtttctgtttggaaagaactccatgttctgttcatacaatgatttctgcatgtgtagcttggttaaactgcttgtttttttttccctttttgatgagaaatcttctgattctttgcatatcaaagaagctttcatctcttgaatcttagatttgggatccttctaagcccaacggttttggttctgcaagattgtacaatttcttcatgtttgttacctatattttacttctcagtgacgctgtcatgttgtattcttcttgctgaattctactataagtgcacgctgctgtctctgtttttcttcttctgttcacttcatactctgtttcgaattattgaagttttaatacaccgaagaggtggccataccgggaggaaattgattgtccttgtacaatacgccttttctgtttgtttcctcttcatttcactttggaatttggtgttatgatttgtgtcagtaaagcttatatggcgttcttacaaaaccttgtatgcattttgttcacagtaatattttattttaattattctttgcttgattcttgtataagatataagattaatgtgcaaaatactgcagcattgcaactgaagattgatactctcatgttatatgtctcaaaaatgcatttaggggccctgataaatagtgtcatatcatgttatgtctagttgactccttttcgtgtttttaccaaagctcttatgtatttaattgatctgtagtgttttgtaattgtattcactttactctttctccatatttgtcaataaagttattgtatatttgtattcatgttattaattttcagcaaaacaaaggtctgctatgggtaacagccttcctgtagaatcaaagttcactgatgaaaaagagaatgacagaattaagtatgttgtgtcgtctatgcaaggatggggtgagaaaatggaagatgctgtgagtaaacttgcagccttttgtatgacaaaaaaaaggatagttctgcaaaaatttcttactgatctgtaagtaattgtgtaaaatactgtgactgacatatgccctctatattctctagcatgcagctattctaaatcttgatgataccatgacgtcattctttggcgtttatgatggccatggaggtttgatcttcattctctctcttttttttttttttttggtttcaaatcctccaaatcgtcggcataactgtttacatcatgctttgtttgtctttgtatgtcatgtgtttatctgcgtgcatgttttgaaaactttactgtttatgctgaaacttttacctgtgaattctcaaataaatattaggctacagttctggataatgaaccaagtttgctaattagtactaatcacctttgtgcggtgtgctttctaggataacatgaactgcttaaacagaaatattattttacgagggataaaacactgcatggttgtgagttaatattaacagtcatgataattaaaaggatagccactgatgaacatgttggttaatttatgtgtggtgctatttttcttatgatacctatgaagtgctgatctgctgtgttcatcacattgttttgctttataagcttctatatgcacataggagtaatcttgagccaccattctgagttgtttattttctatctcaggagctgaagtagcatcatattgtgcaaaacgatttcatattgagctttgcaatcatgaagactacgacagcaatctaagtaatgcgatgaggagtgcgttttacaggttattttcgcctagtctatatcattttgttgcactgaatgatgctgcacttgcaaatttggaatatcattgttcctgtgtaatttctgcagcatggatgaggacctgcaactgtccgatgcttggagggagttagttattcctcgtaataatggatggatgtattttatcaaggctggtgtctgtgctaacctttcgcctttcccgcaggtagtgatcctttaacccctaaacatcttataatatccatatgttgaagaagttactcaaaactgtatttgttggacagtgcttattgtatctatgaaaaaggaaatggaagaatgtgtgtgatatcgagactattgttctttcttgagatgtactttggagttggaagagatatgtttaaccctaacctcaactaattgcgcctgtaaaaaaaggtccagttagttacttatcagttgcctggtttggtgagttggacgcctgacaggttattaagttcttattgcaccttggttcttgtcatagtatggcactaccctaaactgaggtattgtttgcggcatctcttctatggttatctctttcatatacactggtttggctttcagaaatgcttttctttgtctggttgcttttgtgagctatttcttggttaacctgtatctctactatgttggaattctctattatgtcctttagtttctttcttctttttccaggcaacatatactgcgccatcatatgaagggagcacagcatgtgtggttgtcatcagaggtgaccaattgattgttgggcatgctggtgattctcgttgtgtactctcaagaaatggtcaggtatagtgactatttccttatcgaatttcttgttggtacctaatttgcatgctcacttattttcgtgcctaacatttgtgcttgtttctgttgtgtcaaaaggccagtgcattatccgtcgatcataaaccagacagtgagtctgaaagagagagagttcagaatgcaggaggagtagctgttgggtatagttatcgtaaaataatggggaggtgggtaaccaagaaacaatggggcttcactgattttaagggaagagtatcaatctcaagatcaattggtatagtcttgcctggatctgtttttcgtttattgcagataatagcaccgaaaaaaaaacatattatgttgtgatttgctgatgtgttgtacccacttacatttcaggggacttcgcttgcaagaagaacgaacgtttacctcctgaagatcaaatgctgacatgtaatccggacatcctgactgtaagtgcaactatgtttgtttagtatttggttgaatttgaagtttgtactgctgtgtggggtctgatggaaaatccccctttctgtgtcagatggacataactgatgacatggagtttcttgtgatagcaactgaaggcctctggtaaattttgaacaaaaaataactgacaataattattatttgatcattttgatgtcactagtactctttgtgatgctgttttctttctcctgctgatgcatatatagtttcatttatagttgcatacctactgtactatgttttttccatgcaggtgcaacatgacaaatcaaaatgtggttgatcacacacatgaccgtcttttggtgagtccttttcttttgctcagtttgtcttcttggcaggacaagagatctcctactgtaatagcaaaaatattttgtgtcaaattctaggaaatgacttcactcaggcaatataaagcatccgattttttaaaaaagaaaaaaacaagtgctaataagtacactgtcatctgctttgtgattgttcgattcttttgttgttaaaactgctgttccttttgccttgatcaatattgctgtgactaatatcttgcatgtttacgtcaaaaaaatatcttgcatgctcgattgtttcgttgttaaaactgttgttccttttgctgtggccaaatattgctgacttgctgtgaccaattaatatcgctatgcaggagggtgcagaagcgcgtgtcatctgtgaggagcttgttcagtttggcttgccatcgggcgacaacacgaccgtcatcctggttctgttcaagcccggcgccttccctgctgttccgccggtcgacaccgacactgacactgacagccacattgacgatgatgtcgaccccaccggcagcaacaatgccaccgcgtccgacaacaacgaccccgccaacgaggttgatcccactgccaatgccgggtctgacgacagcaacaccggcgacgaggtcaaggtcgacgccactgccactgccgtcggcagcagcagtaccactgccgtggctgctgacgagggcactggcaatcctcctcatggcgcactagttgacaccgacgacgaggacgggctgacctactcccaggacatggacttacccccggcgtcgacgtcccccccaaccttcccggacgaggacgacctcccccggtctaacccggacaagtcccccccgcacgtatcaatcttattcagagtttgagtccagatcaggaaaggccagaagctatagctatgattcggaaggagtagttcgtttccacttgatttttgtctagcaagtcgaagatgatgtgtgatgatgcatgcaggatgatacttatcgtaggtggtagtagcactgtgcattgataggagtagtttgtttctgctaccttgatgatgtgtgatgatgcatgcaggatgatacttatcataggtggtagtagcactgtgcattgataggagtagtttgtttctgctacctttggtttgtggtttttgcctgctgctttgcataggagattaagattttgcttgtcagactcagataacttcaattaactgtctacgaaatctcgctcactggtttttgagttgtgaaggtgattgatctagtgatgctttttgttgttgttcattttgaatatctgtacatactgctgggttatgacttgccccgtttctgaatacttagcttttaaccaaattttctcttcattcttctagttatcttgaatatgtaatcagtaatgtgcttggtttagcggggaagtctatttgtccctgaaggacaattccttctgctgcatgccacccaaaaactcatcaaaaagtttgaaaaaaagaaaaggacgagatagatcgaataaataatatcactccacaaatatgcaagcttaaatttgacacatataagtagaattagaactaagtaatttgattgtgaataatacgaaaaacttttttttatgtcaaagacaaaaagctagggcgaattctcattgaatctcggttgttcatgatagtgatgaccatccattcaaatcttcaggtagcacccccaaatcttcaacaaggcggaaagttcgtgtgttaaaattgttgttttttgttttgtatatgttgaatttgaacttacatgtctgttgagtaatatattactcctacatgttaatttatctttaaaatctttaatgaattttcggatgacatacatacataaataaaaccggagacaaatccacctctttggttaagttagctctgttgcctgctgagaccggctctgaatccggcccatggggaccgtatctgaatccggcccatgggctgttaggccgtagcgggccgcactcctctttcatcagttcggcaacagcaacagactcggcatcactcacccacccaacccagtacccaagccccaacctcgcctcgcctcgtctcgagccgacctaaccgcgaacccccaactccgacgagaacgacatggacgccggcggcgaggaggcgaagcaggagcgccacctggtgctggcccacaagctcttcctcctctcccaccccgacctcgacgacctcgccaaggtcgccctccgctccgacgccctcgacgccgtcaagtccgatggcatggcgccgctgttcgagtcgctggccgccgcgggcgtcctggagccggacgacgcgctgctcgccgagatgcgcgcgcggatcgacgaggaggtccgcaagctcgacgagaagtgagtggattcttcctctcttctgattttattttactagcaaatatgcccgtgcgttgcaacgggtgaaaaaacataatgataatatacatttttcatgcataaccatgtcgataacaatcagaaaattagaactacgaaactttattttctagcgcgttttcttttgtgcttttttctgacatttttccctcacgtgtttttttaaaccgtttttattttctcgcgcattttttccttttttaatatactgtagaaacttctctttttatagttagattagattagattagagataaagaagatatataaatggactaaaaaacgacgaatataaatttgacttttttcctccgcgcttttttccgtccttttaattttttttctcgtgcatttcttttacgaagggtttttttcaccactttcacatagtgtcaaacctttctagatataataggattcgattttttttaccgcatcacgtataattcctttttctttagaaacagacaattttttcgcccttttttatcgcgtcaacggagtcggaatcgttttgattttttcccctttttttggatcggacagatttttttttgcccggtttatttcgcccgatcgattttttttaccgcgtcacatataattccttttactttggatttttttcgccctttttttaccgcgtcgacggagtcggattcgttttgattttttttctccctttactttggaattttttcgccctgttttcaccacgtcgacggagtcggattcgttttgatttttcccctttttggctttttttggataggacagatttgtttttttttcgccccgtttttttatcggacttttatcttttttttcgcatggtttttttattttttttaccgcgtcacatataattcctttttctttatcggaaagttttttttcgcctttttttaccgcgtcgatggagtcagattcttttcagctttttccttttcttttatcggacaaattttttttcgcccatttttttttctcctgtttttttcggatcggactatttttttcttttttcgcccggtcgatttttttaccacgatatatataattcctttttctttggaataggacagttttctttttatttttttaaactctttttaccgcgtcgatgtagtcggattcgtttcgatttttttcctttttttgctttcttttttgtcggacagatttgttttttttccacccggtttttttccgcccaggtttttttatcggacttttcttttttttttttgctccacgatacatataattcatttttctttggaataggacagttttctttttatttttttaaactctttttaccgcgtcgatgtagtcggattcgtttcggtattttttccttttttttcctttttttttgtcggacatatttgtttttttttcgcccggttttttttcgccaggtttttttatcggacttttctttttttttttcgctcggtttttttctcccgttttttgacggacgacagaagcacctagagaagtgttttttttcttttctccaatccaatacagatcggatctcttccagggaaatcagattttttttctccagggaatcggactctttttttttcgctttttttattcattaaacggtttgtctctcggactttttttttccctttttaagggatcgggtgtttttttgccagggaatcggacatctttttttttcctgtttttttcgctgtttttatttatttgtgacggacgatggaagcacctcttattttttaagtagtagtagatttttagccccccaaaaattaggccgccccttgctgtgttgcgtatgcgataagttttgcgataactcaggtgttgatatggtccgtttgccttagctaacctagcttactctgtgttgcgagatgtagatgctaaaactggtagatagcttgcatttgattcggtagttgtaatttatgaattatgtttagggccaattaattcacctctatgcaaatctatactacataataataaactttttccacatttttgttttagattcatgtacatattcatgattttgtacattttctctgcaatgtgtaatttagcatgtagagaagtaattgagattgctaaggatcacaatacgcaacttctcgagacaaaataccagtgtaaactaatgtgaaggaagaacggcatgttgaaatttgttagaaatagtttccttgagaagttgaggttccagtcaagatatgtccttttggtgatttgcatgtttcattgtttctactttctgatcttgctcttcgcatctgtatctaatatttcagttactagaagtttgataagaatcatttggttcctctggaagtaactaagtaattatgtttcatgtatgaagaattgctgatgctgaagagaatttgggtgagagcgaagtgcgtgaggcccatctggcgaaatccttgtacttcatgagggttggagagaaggtataaacttgtgtgcttctatactttacattaagtgtgtgcttgagatttagctatttgcattctttgaaatcaatattgcaggaaaaagcactggagcagcttaaagttactgaagggaaaactgtagctgttggccagaaaatggatcttgtgttctacactttgcaaataggccttttccacatggactttgatctcatctcaaaatccattgacaaggcaaagaagtaagttatagctttgattgtgcctttgtgaagttccattctgccatctatactggagcaatgacatctgactatttattgtgttgattgaagcctgtttgaggaaggaggcgactgggagagaaagaaccgattgaaagtatatgaaggcctatacttcatggcaacgagaaacttcaagaaagctgccagcttatttttagattccatctcaactttcacaacttacgagttgtttccatatgatacttttgtcttctatacagtcatcacaagcataatcacattggatcgtgtatctctaaaacaaaaggtaatttcacttcttacactctcttttctttttcttaattgactcactaacaagaaatatggcaggtggtagatgcaccagaaattttggcagtgattggcaaagtacctcatctatctgagtttctgaactccctttacaattgccagtacaagtcattttttgttgcattctgtaagtgtaaagtatcttgataagctgtctatagttttactgttacagtctgtacggctgggctatatgaatatatggtctaaacttcttttcagctggcatgacggagcagattaagttggatcgctatcttcagcctcatttccgctactatatgagggaagtgcggaccgttgtctattcacagtttttggagtcatacaagagtgtgacaatggaagcgatggccgcagcatttggtgtgactgttgatttcatagaccagtaagtgctgtcacccatccgcattagttttatgtttgtgattcctgtgtaggacaaaacattcttttctgttcctgtgctgtggagataatatctccctttcatttgttccagggaattgtcgcggttcattgcagctgggaagcttcactgcaagatcgataaggttgctggtgttctggagacaaaccgacctgacgctaggaatgccttctaccaagcgaccatcaagcaaggggacttcttgctgaaccgcatccagaaactgtcacgagtcattgacttgtaaattcaatggtctacgttggacgttggaggtgtgatccttctagatccctgcaaagctccccatggacataaaccgtactgaaattgctgttctacttgtactcctaggctcatgagaacatgatctttatctcggtttgattttattgcggacagcaaaaaggttttaaagagaacctccgtgtgcaatttcagtaagtgtgctttagatttgtagaacgagaagagtgcatgtctttctgagatgaatctgttcgttcatttcaagtcttgtggcgatgtctttttggggttccgcactgtttgatcttatgggtctctatatgcttgaaatagcctgacatgctagtctcaaaagagaactgcaaaatagaaccaagcgtaattccttttgttctgagcctgttttcagatgcaacatttcagaaaacagataaacagcattcggtcatacgcaatcgcgcgcacacactgtacagccactgtaactcatcagaaacgaggtcaatatacaacagtaattttcgccgttccataagtccataaaataccgatttctaatatcccaggagactctagctgcagatttagtaaggaagaacaaagcaagttactcagagtcacaggcaagctacacattgtttgttgcaaaaaaactcgaagtattgaggaactacacagagctaatctgggacagggaaatgagcacactggaaaattacagccggctgttcacttgacgatctctggtatgctgcgctttacaatcagctctccgtttctgcagatcagaaatggtaaccatgcaggcaggtcagaacgtctgtgtttgatggctatacaaaggcctagagattcacacaagcaaaatcacaggaagcagtaatgtagtttagtgtaggagcattgtctctctttacttactgatcccctgcttctggttctgcttctccttctgtttccgcttcctctcgtttcgcctcttcacccagggcttctcttcctccactggcgcttctgcctctgcgctgacagatcctgtaatctgcgcaaacgactctttggcgccagaggttacgtcgccgaagaagtccttcaccttgtcaaccacagttttgagctcttctttctttgggagctgggataatcaaaacattttactgttagtgacttgctacctttgctcaagacatgcttactgaaaacatggtcatttgtacatttactataagaaatgcctaccatcctcacttaactgcatagaagttcttttccaggacaacattttctgagctactatctagtactaggccaaaataatttgaaggttgtgctctagaaaatgtcagcctaggataaagcaagatacaagtctgaaatgtacattttcagagatttcagctctaatgttcatgagaaattgctactcctacataacttgcagagaattcgacagggagaggagataaaaggcgctagcgaaacgtacttcgatcacattacttgtcgtcagcgcagacctcaggttcccattctcctgctcacccaaatgagacaggtaaattgcaattctcaattttttcgagtgcaacaacatacaatcacgcacagaagatgaggactgagaaaattaccacaactttgtagccatatcgaaactcattgtcggtcttcagcaccctgtactgctcttttgctgtgtctattatgtcatcctcatccttcagaaatcaaatcatgaaacacgcacatttaaatcttctcttttctacaactcttcaaacacgattgtgtgacaatttgtgtaagcaaacagattgtgctgttaattactttgtagatgacagcggcaaggttcctggcgagcgtgtccttgtagatgtactttccgaggaagttgtccttcgccgcgagcatgatcttcgccgtcgtgccgccggtgacgatgttgagcgggtaccagaagtacacctgcagaaaccagaaaaaaaaacccacacaaatcttgatcacacgcacgcgaagcattgggatcaggaatggagaagaagaagaagaagaagaacaagaatcagggcagcacggacattggcggtgcggatgaagatgacgaagcgcgggttgccgtcgtcctcgatcttgggcagctgcggcatgcgctgctgctgggaccgccggtccgaccaccccctccccctcgcctccaccaccagcgccgcccgcctcgccggcctcgccgccgcctgcagcctgctcctcggcgccgtcctcatcagcaggaagctccccccgccgctcgcctcgccgggcgacagctgccgcagccgcgcccgcgccggcgccggcgaagacgcgctcagcgacgacacgccgcccaccacctccattgaaacctcctattccggtctcgcgccgctgtgtggtgtacgtgttgtggccgccgacgaggacttgggagaagaagcagtggaggggaagaggagggaagataaagccgtggaggggagcttatctggtggtggtgagatggctgtggggtcgctgatgtgtgggcccgggtgggggttctggacccacttgtcagtgtgccagtgagtggaccgggattatgcggatagtttttgagatggtttcgtgctctcggcatacgtggcgtggttacggacagctgaaataaaggcacagtagcagtcgcgtggcttctcccggggacgccacgttgcacatggaacggcctcccagtttatatgttggaacacatcaaatttacaaaattcttgcaaaaagataagtttaacagattactcgttggattattgttactgccgattatatatttgatttatgaatgaattaatgttttaaaagtaaactttataaatggcttcgaacaagtgatctatagaaaacatatttaagagacctagagtaaataatctgtgacaataatccaataaagtagctaaaaagcccgtttaatccctaaaatttacttatatgaaaactatctgttctaaaaggaggcctaaaaggctaaaacggagtgtaaacaaagctagaaagatgtaattattatgtttaaatttaaatggtattatttgtagacaatgaaaagcatttttttccgaaataaaattttagaagtaagcaaatacacgtcatcgagaaattgaacttacgacgtttccaaacatctcatttcacatttcaattaaaaaaaacttacgtacagatgctaagctacaattacatgcaccaccttttttacgggcgaacaaggcgttcgtcggccaagagaaatttactaagatcaaattaatggttacaaagaggtttaccacaatcaacaacatcgttgatgaaacctcacacgtttgcaacggacttctgcttgtagcatcgaaatgccggcaattttttccccttccagatcaaccccttcttttttctgctacctgattctcttgactctcctagctaatcgtcgatcccctatatactatgaattaattaaaccccttacgatgatcacattaagactaagggcaccacaagtctgcaaggaagcaacaggtagtcaatggcgaatctgctcttcatctcgtcgtaacccggccacaatgacgccatctcatgcacgtcgtacatctcctccatgcagcgtgccaggtacacgacgctgtatcccgtcaccgcctccagcccgtcgtcctcccacggcagcggcggcggcagcccggcatctgccagggtggtggccgcgtaccgcgcgaggtacaccgccgacgccgccacgacggacggcgggatcctcaggctccggcggtcgagcagcgtgaggtcggcgaggtggtgcgccacggcgtgcacggcgtcgccgccggagtagccgtacctggcgaggaagtggtcggcgaaggtgtgcgcggtggggcggcccagcctgtacccgagcgcgtcgagcaggtcgagctccctgtcgagcacctcgctcctggcgatggcgagcccgccggcgccggcgccggcggcggcgtcgccggcgctcagcctctcctcggggaggtcgccctcgtacttggccgcgacgaagacggccgtggcgccgagcagcgcgagcaggcggtggctcaccgcctccaggggcctcaccgactggtagcggtcgacgtaggcgacggcgcggtggagcgtgccggcggcgaggccggcgtgcccccgggtgatcccctccatccacgccacgagcgacgcgcgcgtccacgggtcgacccggccgcgctgcaccgcggtcatgtagtccggcgacgaccgctcgccggcggccatctccatggcccggaggctggcgtacaggtcggcgtcgtacgtccacgccgcgcaggcgcatctctcgccggcgcagtagctcccgtccgtctcgtcgccagcagccgctccgccgggaccattggcggcgacggcggccgcgatctcccggagcatagcctcgacgtcggcgtcggcatcatccagatagagataatccatggcgcgctctgggcgcggagctaggccgcgagctcggtgatggattcttggaagatgggaagagagggagacgacgtgctcgctgcaaatttatagcgccacggatatgatgatgaacccgttgactccgacatgatcactgcgatgcgacgagctcaagagtccgaattggagttgacctggcccgcaagtccgacttgatcccgtactgggccgagggatacggcctgtgggccggcctgctccggccttgggctgcagctagctgggccggcgactccgtggagaccatctccgggcaaggaatttttttcatttttaatttttttcttttaatatttacagaaataatctatcggcgcaaaaaattacaaaaatagaccctgccgccctagtggtgggcggcaagctgacgtggcagacggcggctcgacggcgccgtctgcggccgtctgcgaaaattgcatttagccggcaaggggctaaatgcaattttcgcagcatttggctcgtacattttgcatctgggtcccttgccgccctactagacgtaccagccaaaaagtactaggcccgggctgtcttttttgcatgggggcccttgccgccctaacagagggcggcaatggttttcgtgcaaaaaaaaaccctccctcttccgtctgccgtcaccgcccgtccctccccgtttgccacgtcagcttgccgccctagtagagggcggcagggtctatttttgtaattttttgcgcccatggattatttctgtaaatattaaaagaaaaaaatttaaaaatgaaaaaaattctccgggcaagtggcagtaaaaagaaagaacctaacacgtgcatcaggaacatgcttagatctgcgagcacagtggtcagcttagccatgtggttcatgcactaatcggagtacataatacattagtacatgaatggtgattattctgtataatttactgttatatacagcgtagtactccgtactagcgagctggatattgagttcttgtttatgggttcgttgagacgtcagcgagattaggacgaagacgtttagtttatcataagaccatttaggtcatagaggtgtcgaaacatgaattcggcaataataaaagggggtagcgcacgagacctaaaagtggatggatgcggagacaaaggatttagacaggttcaggccctctcaatgagaggtaataccctactcctgtttggggatttgaatccgccgggtgtattatagatctgacgatctagtttgtgtcatcatgccccctagagggcctcctgcccaccttatatagggtggggggcaggattacaagatagaaaccttaaccaatacggtatcggtttcctaaatctactttacaatattatcaaaccaggactttaggccgttccgtaatatataaggaaacgtaatacccgagtcatgatctattacatattccatagatataagttatcccctatgactagtcggataaccatgccgtatgggtatggggtacccataatatccacagtagcccctgagaccttcgcagtcgaaaagataatcttctctcgaaccagattactccaaagccgagtgcttcaatcatctttgtcatggtctcccgagtacttttaccaaatctgaagactgtggagggctggaaaataaagtcaggtgcaccgactagatgcacctaataggtgtagcccccgacaatgtggttaattgaacaaaccaagcatatagtcaaggaataaataatccaaccaaccgagtggttttgataatcgtaatcaaccaagtgacttgatatcaatatatagcatatgcggtgtgaatcctccaaataacatgatccgggtgatataccaactgctttgtaaaatatgatgagtgatatagcaaaatagctataaagaagcttgaatgctgtgaataaagaaatttccaaagtattgggcatacgccatgcgcacactgctttaacagatgtgcttaagtccctaaaagacacatggtttcaccacacctggaaatatatggcatatgtggtataacatccgagtaagtaaactcataaaggatttaccaaccgcctgacaaatgaccataatatataatcagcctaagccataatattggtcaataaaaatgcacacttacgtggcaaaaagcaatgatattgtatccaatcaattgcttgataaacccaaacagcaccttgactatataaaaaagtcagcgggacagctatataaagctttactgtttgacaccttttaagatgcattgtaccaactcctaaaaagttaagtaactgcggtataaaaggattttaaggtattgggcacttgatcacgcgcactttggcctaagcaaaaagtgcctaagtccctaaaagaacgtgacaggccacacctgaaaatatgggctgcagacatattaggcctaggccaaaaaatatgccttcgataccctttaaaggatgacgcatgtaacatgctcccgggtaacaaatcttctgggtaatatagaccaagtgtagctcatatgaatagcttctgatctgaatgattatcccttatgggatactccaaaataaatataataattgaatcccgactggcgcaagtattcggttgatagcctttacggggaataataattggtccagtctttgagcatagaagatagactcatgactatgaatccatgtggaatgtatccggaacaagtcccaattggagatataatcctcacgcttgagttgatgagcccctgagcatatagcttgtcattttgtcatagtcaaaattgtctattggcaatagctgacgcagtcggcatggagatgaaatgaccaacatgaagacgaaattgctcatcagaagtaacggaagatgtcagtggtagtaaaaaacagtgacaccaatcaaaggtaatgaagttgcataaccatggaggcgaagaaacagtcggtgttgacaaaagcaaaccgacgatgaagacgtagacgcgcatcaacagtgatggcgaaatccactaatcatgaagatgaagaaaatagttgacgacgacaaacgcaaccgacatgatgaagatgacgatgtcggtgatccagccaatagcagtgtagcaaccaatgataatgacaaagacgctcatcagcatttgcatagtaggtcaaccgtcaaggtgaaataataagtcggcgaaaacataatcatccattagcaacagcagagatgtcagggtcgatgaagcagaggtgctggtgatgatgttagtgacaataatccatcaaattaatgttatagctgttgtagatgcttcacttggaggagagttgatgttgttgcccaactcgtctaaaccgaaatatttgaagttgttgaagtagaatgtctgctccgaagcaaagatgaagataatgactcctggagttgactcgtgggttgatgaattgatttcttcagcttgacataaaatttgtcaaattttgagccttgtatttgtgtagcccccgactctttgattagttgggaaacaactgaacatagagtcgaaaactgtagcctcttgtcgtcgaatagttattgcttgattgaagatatgtgttgaagatttccaagtagaaatcatgaatgttggagagcctcttattgtagtaaaataacatggcatcgcatgccgagatgtcgaggcatgatgacaaagacgtcgtggttggtgaagtagtaaaacttgcgaagtagcagcaatagagtttgccagtgccgaagataataaagatgaagtcgctccaccatgatgacaaagttgcatcgccgtgatgaagtgaacacgagtcggcggcaacagaagcaaactggtagcgaagacgcgcagttgtgaagataaaagcactagtcggcggcggcataaccagtcggcaacggaagacgatgatgtccatcagtagtggtagctgtataaaccagacgtagaggcgagggcactagtcagcagcagacgagacgaaaggcgatgaagatggtaaggccaatcaacactggcagaatcatgcagccatggaagtgaagaaaccagtcggcagccatggcaaacgtaggcagcttgtgttgaagatactgatgcctataagtagtgacagcgatgtagccagccgtgaagaagatagcatcagttggcgttataacaggccagccgtgcaagcgatgacaccagtcagcggcggatgcggcggccggtcggtgaagacgtagacgcccaacaacggcagcataataggccagccgtgcaggcggaagtaccagtcggcggcggacgaggcggccggtcggtgaagacgtagacgcccaacaacggcagcatactaggccagccgtgcaggcggaaacaccagtcggcggcggacgaggcggccggtcggtgaagacgtagacgcccaacaacggcgacataaagggcagccgtgcaggcggaaacaccagtcggcggcggcgaaggcaagccggtcggtgaagacgtagacgcccaacaacggcggcataaaggccagccgtgcaggcggaaacaccagtcggcggcggcgaaggcaagccggtcggtgaagacgtagacgcccaacaacggcggcataaaggccagccgtgcaggcggaaacaccagtcggcggcggcgaaggcaagccggtcggtgaagacgtagacgcccaacaacggcggcataaaggccagccgtgcaagcggaaacaccagtcggcggcggcgaaggcaagccggtcggtgaagacgtagacgcccaacaacggcggcataaaggccagccgtgcaggcggggacaccagtcggcggcggcgaaggcaagccggtcggtgaagacgtagacgcccaacaacggcggcataataggccagccgtgcaggcggaaacaccagtcggcggcggcgaaggcaagccggtcggtgaagacgtagacgcccaacaacggcggcataaaggccagccgtgcaggcggggacaccagtcggcggcggcgaaggcaagccggtcggtgaagacgtagacgcccaacaacggcggcataataggccagccgtgcaggcggaaacaccagtcggcggcggcgaaggcaagccggtcggtgaagacgtagacgcccaacaacggcggcataaaggccagccgtgcaggcgaggacatcggtcggcggcgacgaaggcaagccggtcggtgaagacgtaggcgcccaacaacggcggcataataggccagccgtgcaagcggaaacaccagtcggcggcggcgaaggcaagccggtcggtgaagacgtagacgcccaacaacggcggcataaaggccagccgtgcaggcggaaacaccagtcggcggcggtcgaggcgagccggtggtgatgttctgactgatccattcctggagcgtaagagataagcttaaagccatgaatcccttttatgcatatctggatctggatcctgcagaacaaacatataggatgagtagtatctgatataaatataatactcgagaaaaaatcaagtattttaaaatatttataaatatgtatttctcctcttgtcaattttgatttccccgagcagatgactcattacgtttaaacactctgcccgactagtcatagccaccaagcactgggagtcggcctaagcacttcccaaacatgcatatgagtgacatgagttcgtcattaatggaacaaagtttcacggatcggagtttactattcgggtacttttgcaattattaagagcagaaaataaattatcttatctctatgcttttgatttattccgaataatacttagcaccttgcgttactcggtccatccaacgagcccccgggtgctaggaatcggcccaaaggcaaccatccattggcaaaccaaacggaaagcataggaagatagaactccataactcgataggtacttttgtactcagattatgtcgcaagcaatcaagataaatattataaaaaatatgatataacatctgtagcacccgactcactactcaatggaagaccaattggtgtagtgaggcagaggaaaaggaaaaatatcatataaagaataaaataaatgatgacttagctttgtaatattccccttggtgatggcagaagtggccaatgtgggaacaaagtcgtccatcaataacaatgaagacaccagtcggcggcgacgaaggcggtcgacggtgaaagcgaagatgcccactaatggcggcataataggtcagccgtgtaagcggaaacaccagtcgacggcaacgaaggtgagccaacggtgaggatgtaggcatccaacaacggcagcataataggccagccgtgtaggcggaggcaccactcggcggcgacggaggcaggccggcgatgaagtcgtagacgcccaacagcggcggcataataggccagccgtgcaggcagagacaccagtcggcggcggacgaggcggccggtcggtgaagtcgtagacgcccaacagcggcggcataataggccagccgtgtaggcggaggcaccactcggcggcgacggaggcaggccggcggtgaagtcgtagacgcccaacagcggcggcataataggccagccgtgtaggcggaggcaccactcggcggcaacggaggcaggccggcggtgaagtcgtggacgcccaacagcggcggcataatagaccagccgtgtaggcggaggcaccactcggcggcaacggaggcaggccggcggtgaagtcgtggacgcccaacagcagcggcataatagaccagccgtgtaggcggaggcaccactcggcggcaacggaggcaggccggcggtgaagtcgtggacgcccaacagcggcggcataatagaccagccgtgtaggcggaggcaccactcggcggcaacggaggcgagccggcggtgaagtcgtagacgcccatgaacggtggtgtgaccaaccaaccgtataggccaggacaccagtcggcggcgacggaggcaggccggcggtgaagtcgtagacgcccaacagcggcggcataataggccagccgtgtaggcggaggcaccactcggcggcaacggaggcaggccggcggtgaagtcgtggacgcccaacagcggcggcataatagaccagccgtgtaggcggaggcaccactcggcggcaacggaggcgagccggcggtgaagtcgtagacgcccatgaacggtggtgtgaccaaccaaccgtataggcgaggacaccagtcggcggcgacggaggcaggccggcggtgaagtcgtagacgcccaacagcggcggcataataggccagccgtgtaggcggaggcaccagtctgcggcgacggaggcaggccggcggtgaagtcgtggacgcccatgaacggtggtgtgaccaaccgaccgtataggcggggacaccagtcggcggcgacggaggcaggccggcggtgaagtcgtagacgcccaacagcggcggcataataggccagccgtgtaggcggaggcaccagtctgcggcgacggaggcaggccggcggtgaagtcgtggacgcccatgaacggtggtgtgaccaaccgaccgtataggcggggacaccagtcggcggcgacggaggcaggccggcggtgtagatgacgatgcccatcaacggtggtgtgaccaaccgaccgtataggcgaggacaccagtcggcggcgacggaggcaggccggcggtgtagatgacgatgcccatcaacggtggtgtgaccaaccgaccgtataggcggggacaccagtcggcggcgacggaggcagaccggcggcgtagatgacgatgcccatcaacggtggtggccgacggtgaagtcgttgttgctatcagcaatggcggtggcgaggacaagccggcggagtggactcgcggccgatcgaccggaaagctgagacgcctcgagtccatgaccagcatcaatcgcctcaatagtgccgcgtagttatatgcgaacaacaacaaaaaatagcaagaaattaatctgagattaaaaatcaatatgataaacaatgataaaaatcagattgagtttccccctgactgatttggatcaagtcagagaagaggaggttgaagaagtggtcgacggaaaggaagtgaaaactcccaaagcgaaaacgaagtcggcgacccatgaaattgattccatcgcgcttgttgatgggaaactcgacgcaacccctacctggcgcgccaactgtcgaaacatgaattcggcaataataaaagggggtagcgcacgagacctaaaagtggatggatgcggagacaaaggatttagacaggttcaggccctctcaatgagaggtaataccctactcctgtttggggatttgaatccgccgggtgtattatagatctgacgatctagtttgtgtcatcatgccccctagagggcctcctgcccaccttatatagggtggggggcaggattacaagatagaaaccttaaccaatacggtatcggtttcctaaatctactttacaatattatcaaaccaggactttaggccgttccgtaatatataaggaaacgtaatacccgagtcatgatctattacatattccatagatataagttatcccctatgactagtcggataaccatgccgtatgggtatggggtacccataatatccacaagaggattaaaacgtggtgctttttagcgtattttgtgacgtcgctgatgaccattgttaaatcatcgaaacagaaaaaaaaaaagaacaaagagatggggatgatagatataccaccggccgcgccgttcgactcgtgaattgattttccagacgatgctcgatttgcggcgccatttggttgatgtcatgtcatggcctcatgggttggaaaaagtgaaaaactttgtcaccaacactaggtgtgtttaattcacacaaaaattaaaaatttggttgaaatttaaaccatgtgatgaaaaagtttaaagtttgaagaaaaaaattacaactaaacacggccacgtagagtactagagtaccagagtgaggatactcgggaaaactacaatccatagaaaaaactacaatccatcggcattccacagattgctttggtctcatctcagacttatcgcctgcatcttcaactcccttcaatccatagaaaaaaaaacaatatttagttatggatgttcaacttctaactatgtatctaagtatattttttttacgggacgggagtgtaaatctcagtatatcagcttcagcaaaaatataaaatttgaaatttatagagttcattttaggattttttatttgtcgtagttttattttctattaacttatataaagcgagtaaatgttactgatgcactatttctatcgctaaaacaagtgatacaaatattaaatgttaatgataaactatttctaccggttcattcatattttatttgaaacacagtatatattgatgaagttgccacgtagtccttgacaaaaatacattacaaattgataaagtcagtattgataaatacgagcatccatgttactccggataatatttatcgttttggacaaaggcatagtcttaaaaaaataattttgaccattatttttcattataatgtgtataaaaatattaacaaatatataattttattaaactactttttaagactaatttatacatatagtagccatatttgaaagataaatattttaaaaatgattcataataaaagatttgatctcaccctggtctaaaacgacaagtattatcaatccgaagggagtaaatatagagcttgaacctgacttggttctaccacagcgttacgcttcacggttcacattttttatatacttcctccgtttcacaatgtaagtcattctagcactctccacattgtgaaacggatggattatattagtagttcaatcaatcggattgacgctattttttttaaaaaaaataacttataagattggtgatttatactatgttggtagggtaacagtaagcgagcagggttggtgggtgtgggcgtgtggcaaagcagagaggcggctaagcgcgggtcaaagctgagaacaacgccgacgagagacgagtcgtccgcgagtataaaagcggcgggggaggagagtggaggggtggatggaaagcgggtgtgagtgaggaagatccccctataaatcgcacccggaaaagatcaccatccattgcccaattcgccgtcgtcgtcttcttcttccacctcgggaagtcaaatctcgtcgccactgctggttagtctccctcctcctcctcatccacactgcttagattcctctttggtggttgatcggttccgtagcagagttctgcgcgatcggtttttccattgctgatttcatttgccgtggaagggattgtgctacgctgcggccttaggatctcatcgcagccttcgcaggcaaattcctctgttctgtgcgccgtgtttgtgttcatgatctctgtgtttattctgcgtgtgctcctcgatttcctggcgccctgatgcgcttgctgtataggttcgttttaatcatttgaagctctcggaacagaatttgctttgcaagttgcagttctagtttatttcgggattattgggtggttgggctgttgtgtgttctagacttctagtgagtgcagtggttcagttgttgcatgtgttccagtttacccgtacaaaatgtaggggcaccgagttcaattgatttacatttgtagtcttgtagatacttttttttttctgtattagaatctcatagaagcatttgactagcataactacagtacctgtttgtgttttatgagaactttgactataagttggcaaacaatgggagtagttcgctgatgtaagttcagggtagctatattagtagtttagtactgatttcatgaaaccaactttaatcccattcattttgattttttttttctgaagcaaacattcattttgatttacactctgttgcaaattggctgttaggtactgacaggtgattcagttcaagaatccatcattcaaccaatagacctttttgttcatattagcatagattaaagttttggatagattataagttatttgtgaatacctcatattgagactaacagtacttttttttacattcttaggttttgtctccaaaggaagagaccatacagttcatcatgtcaggaggatctggtgattcttccccttcatcagggcgggctagcttcagttctttgtcaggtttgaaggacctagaactgtcttcagagtctggttgcttgtccattgtggtcctaggtgcttctggagaccttgctaagaagaaaacattcccagcgctgtttcacctctttcagcaggtaatttgattgtaactagtagcttcttacatagtttggtatactagcttcttccatagttgtcaaacttctgaaagagttgtagtgaaaaagaaataaaattgatgcattcgtgatgagttataattgctcagaaattctactgcagcactttataatgctatattgctattgcatgccatgtacataatgttttgtcaggttgacacacgtacaaagttctgaactgtaacctttggtgttgatagggatttctacaatctggagaagtccatatatttgggtatgcaagatcaaatatttcggatgatggattaagagaacgcattcgtgggtaagaaagatacatattagcaccaacatttaccataaaataatttaagaatttcatgtaaaaataaattgggatgttctgtatgaggaagtagtttctctgtttttaagtctgatgatatactagtgcctaaatagcattctcctgttatcgcagatacctcaaaggagcttcagatgaacatatttcacaatttttgcaattagtaagtcactgatatcatgaatagcttctttgcatttagatttcgtaacacgttgaattttctttgcagattaaatatgttagtggttcctacaatagcggggaaggatttgcatcattaaataacgccatttcagagaatgaaacttcgaagaacaacaaaccaggaagctcacgtagactattttatttggcattgcctccatcagtctacccctcagtatgcaaaatgataagatcatactgcatgaatccatgtgagtacttccccttttttacggattttgaaagctgctgcacttcctttggtgtagtgaagttatccacaacagagtttcaaaatataggaaatatatttggttgtatccactcttgtttgtactattttccttttgtcctctttatttaactaagtatttgccttgtggaactttgctactatttcaactttctaagcataccaattcctagcagtcgccgactcttttcctgacattgctttttcattgggacttttgaaacataaagttttggttttctggaagcaatttgggtgcaatgaatttgctcttagttattaattgagtcatgtgttggttcatagtaaattaaaaatcaaattaattatttttaagtttgatttttagaagttgtgctatactatgttgtagtttcatttcttttatgctagtcaccttctgtaactgtcatattgtgctttcagcttctcattctggctggacaagggttattgttgaaaagccctttgggaaggacttggagtctgcagaggaactcagtgcccagcttggagagctgtttaatgaacaacagctgtacagaattgaccactatttaggaaaagaattggtccaaaatctggtaagttgtatggcttcgtctagttagttgaacgatatattccatgctactataacatatttcaatatatttcagcttgtgcttcgctttgcaaaccgtttgttcctacctctttggaatcgtgataacattgctaatgtacaggtaatatgcttttctatgtagtcctttgtatttttatttgtcaactgtagttacatctatgacatcctctgttattggtataaagttgaatggattagttttggaaattctggaaagttttatcattatcatggtgcgaacaacatgtgcttgaacataataaatatatgctgcagattgtattcagagaggactttgggactgaaggacgtggagggtactttgatcaatatgggtatgttgggagtaactttattttgcatgaaagttccttttactgaaagtattttgttgtaagcacatatgcttgtgactgtggatatactataaaagtgtaaaatcactttgatatattgtaaatggtttatggttcccatagttcacatgaagtcattcgatcgtgtacagttgtccattagaaatatacaaattgcattttattattttcttctaggcattaaacttctttagtttttatgataatacagtatttgctagatttaaaataaatcaactgcattatggtgtttatgttatgagacaaataatcacctagaggacctcccgtgcatcgttattcgtcttcgctgatgtaaatatttgacctcgcttttgttgctgcagcatcattcgtgatatcattcagaaccatttgttgcaggtaaatatatttatttttggtatgcagcatagttttccatgcacttgccttttctaggggagttttatgtgcactttcacttcccaatgtgaatctacattagcatttgcttactgtggtctgtggggactgctgaacattttacttgaccattcagaatgattggtgctttattccatcaccattcttatgttataccacgaggaggcagagcagcaacctgtcatgcattataattcctcaaaagagaatattgctgtttccactttcacgacttgaggccccctttctgtattgatttcgctcttgtctgcaggtcttctgtttggtggctatggaaaagcctgtctctcttaagcctgagcacataagagatgaaaaagtcaaggtttttgcttctccttatacaattctactctaactgaaagtaggaaacctgtatggatctttttttttttttttgtcatccttcgttgcttacaatacttccttctgcgtttttataccacaatgtcaggttcttcagtcagtgacacctataaagcatgatgaggtggtccttgggcaatatgatggctacaaggatgactctacggtaccagatgactccaacacacctacttttgcatctcttgtattgagggtaaacaatgaaagatgggaaggtatatgttacaccttacaacatacagatatacagtattttgaagtcacttttaaacaaatatctgcattttccaactgaactgccttttttcgatacaagagtttcagctgttctgcatcactttgatcaaacatgggcatttggttccaagatttccattttccatatgcctacattgtcctagaaaaaatgaagctgcattgacatctatttctgaccctccagttaccattatcttatctttcagtgcagttaacatagtaataatcgtgcgctgcaggagttcctttcattctcaaggctggcaaagcactgaacaataggaaagcagagatacgtgtgcagttcaaggatgctcctggtgacatttttaaatgtatgcgctaaacaccttctcgtatccaaatgtgctgtgaaacttgtcatcaagtctgatcttgcaaaagtcacaacctattttaagaaactaagttatttgatttagaatatctgaatgctagtccaaaacaaactgaaaaatctgaatatctctgtcaagagttaatggataacggcagacaactctattggaaatataagatgttgcattatgcaagcactaaagagagtactaaacattccttcttgataatactgagaaataatgtaaaaatgtgctagtgctttggtatgaaaaagttacttcttataatgggttatgatgtgacaccttagtataagcaacacttcctttagaaaatagacaagaataagcatgagacggtttgctactttgctacattttagtatctaaaattgctataagctccctactttcaatttgacctgagtaccttactattggtttttgccgggtcaccttactaattggttgagtcactgtttctatgacttatgttgaccctgcttgtcagcctgtttgtgtttaatagatttggaagtgagctgtcattttcttattggtaataatactgtccaaaagacctggtatgaagtaaaaacttgttctgtttaactccttcagataactaattattgttttctataggcgcaagaatctggcagtaagttaaaatgtgtgcgtgtgtggtacctttacatgataacaaaacgtatttttgtctcatgagcagactagagaaatttcacataactgtgaatgtagttaaacatccgtaacctatttgaatcaatacagttctgtctgctattgttttgcttctgccaatggtgtctaaaactctgtttttatttcaccctgataaaggcaagaagcaaggaaggaatgaattcgttatacggttgcagccatcggaagccatgtatatgaaattaactgtatgtacaacttctgtaaacccatttatctgaagatatgtcagaattgtctattcatctttgcctgaagagaactccaaaaaaacaagtgttgtctgaacaaagtgcatgaactgttgcaggtcaagaaacccggactagaaatggcaaccgaacaaagcgagctggatctgtcatatgggctacgctaccaagacgtgaagatcccagaagcgtatgaacgcctcatcctggatacgtacgtcctgttccatccttcttcccccatttctttctgctacactaataacttcttcacttgcattgcgccttgttcccaacacatgccatatccaagatgaactatccgtgttggatgtagaggccgggtttttaatccattatatatatataaaggatgaaccatgatatcatcttccatttttttgacaggataagaggggatcagcagcactttgttcgccgagacgaactgaaggtttgtgctttgtgtaattgacgctgtgtgacttgcaatcggctcgcttgtgactgaatgaatacctgacgccgtgttggttttcaggctgcgtgggagatcttcactccgctgctgcacgacatcgacgacggcaaggtgaaggccctgccgtacaagccgggaacccggggacccccagaggccgacgagctgagcaagaggatgggctacgtgcagacccatggctacgtttggatacctccaaccctttcaaaattctagccgctatgtaccaatgcaggctctgtctagatgccggtttatcaggagctttgtaatattttttttaaaagaactcctactacttcgcctgtctagaacactgtaatgttggtgatcttggaataaaaagaagactatatatgctgcaagtaagcaagttacacatgttgtggttagagttggacctgttatgagtttgccacaagcaactatattataggggctactataccatggatcttgttcagacaggatgatatctataaagtatcagactctggtatcctatatgtactaggggtatcggctggtacttatcaggcaccaactgatgctcgtcggtaccagctaattaatacccattgatacttggtcggtactacagtggtactaggtaggtatcatgtgatacaagtgggtacaagggctggtaccacatagtaccacacaaatattaactatttgccacttttacaagtggcaattaaggatttgtcattggtcccatatgtcataggtatatgagagcctatatgtcatagatcgcgagtggcaaatgcttaattaccacatctttaaagtggcaaatatttaaatgcccgatcccgtcctgattatatagcaattggtgccaagaataatattctacgtactggtagcacatacaaaagacaaagataaataatgtatctataaaggcatcaaataagatacttgtacaatataaggtacataaggtagcagaaccatacatatgtatcgcttgataaatctattaacttattgaactaatagaaaaaggagcctccacgttcgctctcacaacctagaaattctcatattaattagagaaaaagaaaaacatagtctatatagaaatataatttacaaatagctgaaattcagaattaataaaatagagaatattaaagaataaactagagtccataccgatatacaatttagaactaatgaaaattcggaattaaaaaaaaataaaattaaaattaggttagtgtccatatagaaatacaatctagaaataaaaaaaatggaattaaaaaaaggaatattagaagacgagcgtagagtccatataggaatacaatttagaaataacttaaatttgataataaaaataattaataactatcacgtatatacaatacagcatgaatgttacacacattagtagtttggtaaagttagtacagaactaaaaatatgttgtcactttaatatattttaataataaattaagaatatatatatatatatatatatatatatatatatatatatatatatatatatataatttgcgcgggccaccatgctagttggaaaaaaaagaaaatttttcaagaaaaaaataaatgagaaatatcggtgtcacacaagtatcatatatttctcttaaaaaatcaaattgtttcaactcataaataagaaatttaaccaaaaaaaggagaaaaataggtaaagatgagaaagaacctatgtcatatggttagcggccccatcatttgacttatttgcaaatgaaaaatcatttgtgaacaaaacttttatatacgtgttcttagtgatctaaagcaaagactgaaaaataaacttcgatgaaaaaaccctaaaatcaactccaaattttaaattttaaattttaaatttggctgataaacatcagcattagtgaaaagatgaggccgtcgttgctcagctaggaaagcgacgtgagttacttattatgtcgtgatttacacgtagcaaaaaccattggcccaccgagcggaagaaccgtgcgtgacatgtgactcgcgtcgagaaaataggagaaggcatgccgttgggagcgctatatatgcatgggatcttattggtatctagcattcccggccgtatattatacgaaaatcctgttgggcgatcacccctccccacgtggctggcttcttttcctgacaccacattaatttcctattttaatagatttatacatctaaagtttatacacctcaagtttacacatataaagtttatacacctaaagaatagagacccaaaatttataagtcaaaagtttatatactcgattcaaatttgaatttgaattcaaatattttttatatatagtatttctatacatctaaactaatgtttatagacccagattttataagtcaaaagtttatatacccgattcaaatttgaatttgaattcaaatattaatttgaatttgaattcaaatattttttatatatagtatttctatacatctaaagtttatagacccaaagtttataagtcaaaagtttacatacccgattcaaatttgaatttgaattcaaatattaatttatagacccaaagtttataaatcaaaagtttgcatacatgtttcaaatttgaatttaaattcaaatatatttttaatatagtatttctatacatatttttttcaactttgttttttttatttttttaaaaatttatggtgtataggaagagaagaaggggatgaggaaggggagaggagcgtacaggggaatggggatcgatcactccaatcgattgatcgcctattagcgttccccatattatatcactgcttggaatggtagatcactgaaagtgaaaggaagttttttttaattattttctccctttgttgaagcagctgacttggagtagccgattttgttttccctcgtgcgaaatgtgagaggaagcttttttttttctttattatttttctccatttgttgaagcagatgacatgagggcaacaccaatgtataaaattgaagtgagcattagtgtcaggttttgggtcagaggtagtagttgtacgcaggcagcataatgtgtatgagattttaaggtggggtccaccaataaaatattctccaaccctcaaccattcataagtaaagatgctttcatcctgtactctctctgtctcgattgtgtaaacaacattatttattcccttgctatcggtagtaagcatactacccggtactacttatttactagttccacaatggctattaccaggttgtagaggagcattgaatgcctattacctggtttctcaacacattgtggatgccctaagtacaatggcgctcgggcgaggacgtcgaaattttccattattcacgtgagaattgagaggcaaaaacagaacggtagtacaagtgaaacagctagcaacagatgctttctgtgaagcttcctgcattcgagatgattttactgttgacagttctccgcgactgttactcttaactactagtacggagtagtacccttttggggggtaggtggtcaacgacgcaggacacaccgtcgtcggctagctagccgcctttcactttcattcctaggcattcatgggaagtttacccgttatttatttattctggattattaatattataattttaaaagtaaatttcacaaaactataaatacgttcgccaaattatcccaaaattggtgatgtatcaaaaaacactacgaatttaataacaaatttatcacaacattaactatacggtcaaagcgaagtatcacaaaactacatattttaggatttaaatccttagcactaataatgttatgtttcaattataaacatccaagttttgtgactaaattgactctaaacatgtagttttatgatagctttattattaaatttgtagttttacgatactccaacttaaatatgtagttatgtgataaatttggtattaaatatatagttttgtgataatttgatcaaagtatatacatatttttgtaaaatttactctaaatttaatcatacagtgaatacaatgattatttattgaattgtgtggttttgattaaaagaacgatctatcagtagagtattcacaatatgtcaaaaagtgagtagtaaggaagcttgttatctagtttacctttgtgagatactctaagtagtaaaaaggtagtagtatcatcttagtagtaacactaataacaggcgacaagcaataaataaatattaatactctcctctctctctctctcgtccattctttcttctcaatccagccatttctcttaaatgtgagatacaacttatccacacattatgataacaagaataactattacctggtttcgtagggttcaccctttatattggtgaagatatgtcaatgatgccctttatatcttgctaattattattgattttgaatttcagaagtaaatagatatataaaatactaaattgaaagtgaagataggtacaactttatatttatttaattcttaattttggaaataaaataaaagtccatgatgttctcaattgtatttttccgtctagaagaattcccaatgcaatctataatcgtgatgacatgattaacctaattaacggctttaatctgttttcagtatgggagtttccttaaagagcctaattagtacagatctctttattagaaccactgctttatcaaaacaatatttcacccatttcactctttttattagtttaattttggataagcacgaacaaataattttttattcaaacttttaaaaccataagccacacccttacatccttcgtactataaaaactaaatcctaacaatatatctggatacatattgtacccaggtacatagttaggattggacttttttaaagaacggactgagtacctaataagcaattgaacaacgaagtgaacgtagctccactggttgggttccttattgtggaatgtgtccaacggtttcaagttttaaatttaacacgagtgatcgtatttacgactaattattcttttagtggtagacgagatgaggcaccgtgatgacttcctcatctcaagatatactagtccagtatttcggatgtgctcataggaatagggtgtatatttgttcattcatagggtgtgcatttaaattgtgttttttaaaaaaaaaagaaataagccactgaacagattgtttaagtaactttctttaacctttatggattggattataaataatataatactccctccgtttcagcttgtaagacgttttgactttgatcaaagacaaattgttttaagtttgactaagtttataaacaaatatagtaatatttataatactaaattagtttcatcaaatcaatttgtaagacgttttggctttgatcaaagtcaaattgttttaagtttgactaagtttataaacaaatatagtaatatttataatactaaattagtttcatcaaatcaataaattgaatatattttcataataaattttttgtcttggttgaaaatgttactattttttttacaaacttagtcaaatttaaagtagtttaactttaaccaatgtcaaaacatcttataacatgaaacggagggagtacaactgttataaaaactaggaaggtagcccgcgcatacgcgcgggcatgttgtttaatcttgtttgaacttttattacgaatgtttatgtgtggatcatatttttgaaaaaaattttgtctctatttgaaatgtatgttcgttaataactggtttgggcgtattacttgaaaatgtatatcctcaaatttattagaaaaaatatgtcacaataatggagttagttcatatctatttgtattatgtgtgattctttcttttaaatttttggagtttcccaactttatataactttttttattgtgtatgttatagatgacttaaagtaacattttaattttactatatattaatgaaagatatttattattaaaaatatagctgatgatactacttcatctaattaaacatagacttatattaccaccgtcacataaatcgaaggagttaacttttatcccaaaataatagaagaatttatatgtaactgagagaaagtgattttttttaaatactatcacgataatccaaagtacggtatcatactttgacaaatatctatagggtagtgcatgttagttcagtgtccgttttgttttcagcacctattgttctaatcacatgagacacctttagtaatttggataatacatatgtacacttaaattagcgttatatattcgtcaagtggtttcttacactaaaatgtgatgtggaattattatcataacattaattattacatgccggctccatatttgtgatgtatttagggttatagatattaatagtttatttatttaaaggaatacaactgaatcacaaattagatatataattttaaaataatttaaaagatagaacgcttaaaatcattgattggatattttatatttacatttgtgtaaatttgaagattattatattttatccttaaattgttttttaggtattatccttaaattgtagaaaaatattttttaaagacctccgattgttttactttatcataagtattttttttccttccgtcagacgatatgtaagcattattgttttttttcaatcataactacgtacagagtactttttccgatcaacagttatatatttttcatgtatccgtatataggagagttgtattatttgtcaataataaatctaatctaatggtgtaaaatgaaacaactaaattgttttcatttaaattagcgttgtatattcatcaagtgatatttgacaccttaaaatatgatatgaaataaaaaatatcatagcattaattattatatatattagtcttgtatgttaagatagaacgaataaagatcattgatggaatattttatatttataatataaatttagtttaactacgtatatttgcataaatttgtagagcaatatatttatcttcaaatagtagataatactaattcaaaaagaccatcgatctttttccaatgatacatatttttttattgtttttatagtaagtgattttgaaaatactatttcagaaaaccaccgtgagtagatttttcttggttccgaaggacagtaggtaaacctcgtttcttttcccaggtcatttgcacgtactgactgcttatatttcccgtatacatacatacatagagtaatatggtgttttcaaaataaaataaatataatctaatggtctaaaatattgggttaaaaatcgacggtgatatttgcttaaatttacagagtaatagcttttatatttaaatagtagaatactccatttttaaagataattgattttttcaatggtactatgtatgtatatttttttagctttattgttttctatagtaagtctgtgcatagtttttttttttataaacagtaggtaagattgattgttttttagtcttatgtatgtacgtacctatatggagtatatacttttgtttttgttttctttttctggtgaacagtaaggtattagtttatttttaaataaaatacatctaatctaaccgaatggtccaaattattgggtccacttatttaagtgaaaaacgacgataagattatgtgatttctttctttttctagcctaacagttatatatttctcccgtttacgtagacatagtaataaggtattagtttttaaaataatatacatctaatctaatggttaaaatattagattcacccatttaagttaaaatcgacagttatatttgcttaaatttatagagtaataggttttatctttaaatagtagaaaaaaatctatcttaaaaataatagatttttaatggtagtacgtacgtagtttttttttggctttattgttttttttatagtaagtgtgtgtgtattttttttccttacgatgaacagtaggtaagattattgattgttttttagtctttacatactacgtacgtacctatatatggatatatggagtacatgtgctttgttttcttttttctggtgaacagtaaggtatttctttctttttaaatatataatacatctaatctaatctaatggtctaaattattgggtccaccgattaagtgaaaatcgacgatgtaattagacattgccacgtggcggtctaggagcgtttgtaggagtgccacgtggcggcttgagagcgtttataggaagtttaatggacttttatttagtatatatatataatagatagaagatagatagatataagtaaaccaaaacaaagaaaattcgtccctggccacctcacccggccatgacccacatacgcctcgatcgatcgaaattccgatgaagcttcttcccttccatcttgatgtcccggattcatccgcacctggtcagtaatatcgaattatcgatcatcatcccggtcgatcgatcgatagcaaccgccgatcagggtggtataaattctatacggctccgctagctagctagcttgcctcgcgctcgcttccaaaaattaattaaccacaaaattaattaagtagctagacaaccacagccgccgtggccggtgcgttctgatccaccgcgcgatggctgccgaggataacatcactggcagcggcagcggcaatggcagcagcagcaacgacgaccatgcgccgccgccgccgcagcagctcgccgttgcccgcggacggcggcgtgctgaaccgccgatgcgcctctccgcgctgtacctcatgctgttcggggcgaccgtgatcgttggcgccgcgggcgtcggggcgcccgtgacgccgctgccacggctgttcgcggcgctcgtggcctggctcgtcggctgcctctcgctgctcgtcccgctcccgccgccgtgacgacatggccggtcgcgagcgctggcgccacgccggccgggcgcgcgcgcataccaatcgcgcgttattggctatcgattgatcgatcgtttcctcgatatacgcacgatcattctatatcgtacgtaagccgcgcggtgaggtaccgtacgtttaaggagaggactatgggtcggacgtccggacgatgttgcactatacgttaaaaaatgttacaatgtttcattactcgaaaaaaaatatttcaacataaattgttctggatgtttcatctttcactaaataatgtttcaccgttttatcgaaaatgtttcaatcgaatgcaacactcaaagaacactgcctgcaacaacaaaaacacaatatgtgaaacatccaaagaaatcaaatgcaacatccacagtactgagaaacatctaaaaagacaaattgcaacatcacgaatacactatgtgcaaaaaaaaaaaaaaaaaacgtgtgtgcaacaatcatgcgcagcatcctcctcacctcttcctcctcctcgtcccacacctccgacaggtgcggcctcctcagcgttgaggaggacgaggaggcgccggtcggagcaaagccgatccggcgaccggctgcttcctcctcggcggaagccaccgcgaaggccggggcctttctggcgtcgtcctcatccgagcgctgccgccgaagcccactcacgatggagacgagctcggcgtccacgtcgtcctcggagaaggtgaacccgaagtcctgcaacttcagctccaacgacatgctccgccgccgccgccgccacctcctccccgaccgccgcaacgccgccctcctccgctccagcactgccgctgccgccgccgcctcccccggccgccgcaacgtcgccctcctccgctccggcaccgtcgccgcctcgtcgctctgcatacactcgcttcctctcgttgctaggtgagagagaaaaggggaatggtggagagaagaagacagagaaagggggaaagtgggtggggagagaagataggggagagtgctggcatcggacgcccgatttaaagcgttttcgtacgttttctcctccacggaatttcagctctcgatcgactaagtaattaacccgctatatatcaaatgccgcgtaaaggtacaagcttggcgaaaatttaaactctgtgaaaggaataggtatgttaattgtctaaaagaataggtttatgctcaaaatttaactatttaatttgctggcttgtcgggtgttttgggttaggcaacaggggggtaattcttaatttggacctggcaaagggcgccaaactaacaataatacaagatcacaattaagacggagaaaaagtgctttaagtaactttacctaaaaaaacgttttaaacccaatagagcgtgggaagaaggtggagttgcgagttcatgattctaccttaaatcttaacacccacaaaatagggctttatgtgtatctctgttctctagttagtttactagacaaaagttatacttttctctactgctgtaaagagtagagtcgtcattctcttctccaaccatattagccaccacataagaaaacaatgtttccacgaaaaaataatcaaaaattaataaaacggagagatttttttttttttagaaactgagagataaaactgaaaccaataaaaccattcacccatagttctcctaaccccgttgcaaaagcacgggtatgaaaaagagctcctagggtatgtgctatatcattctcctgcgtgatagttatgaaaagattgaactatggaatgggcaaaattttattttagtacaatggctactctccattctagtgcaaatcagagttttcatagacatgtcgtttttccccttccaaaaactgagggctttttggtgtatttctgcggtgtctgttggctcttaatttattaagtattttcgccgacatcaacgttagtctgcagctataaattaaaactctatatttaattaaaaaaaaagttggaccgtatcttctttagtttgtttcttcttcagtttgatctttaagttctatcgatgtaacgagcaagatattctatgtatgccattaacaaaaattaatggcttgttcctatatatttttcaaagatggcttgggttgacttagcaatacaaggctacatggcttatcgttattcttacagtgcgatgatcagtggcaaagccaatgcccaaccaccatgggcagttgcccagcacatgataagagggcggacaagctgcatcgttgtggtgttttgaacggctgttttgaacgatgccggtggctagccgtacagtggagtttgcagaactggatttttttttattttagttcttttaaaaaaaacttatttataaataggtatatggaaaaacttattttagaaatacacccttttctcagcgttagggtcattggcgctgacaaatgtcttgacgctaatgacattggtgccaacactcttacctcttatcccttgggaagctaagtcactaatgtgaggggtcgatgccaataacattgtgccgaggatctatttgtaaaaaaattcagaaaaattgaaatataaatgattttttataaatagatcctcaatatcaatgaattaacaccaaatacctttttgcaagaaaaatcggttgaatgccattggtgacgaccgcagtgacttagcttcgcttccgtaggaggcgagggtgtggtcggccttgacgtctgggtcactagcaccagaaaaatgtccgttcttggaataagactttttgaagggtccaaaaatatttttttaaaaaagactaaaatgtaaaaaggtgcaggtttgggcaagttgtaaaagaatttactccgtctatgccgagacgtcctcctccgttgccgccgacacttttgtttaaaccccacgggatatatttatattaaagtagagggaaacgctgtacaatagccatgaaggctaggaggttacaacgaaaagagtaaaaagaaagcggttattggggggggggtgtgaacccaaaaaggaggcgtgcggattattattacgaaaatagatgcacaacggagacgaattttacgtggaaaaccattgtggtaaaaaaccacgagcatcaaaccggcaattatcagtattgatgagttgattacaaatgtagaggaataacaatagtaacgtcacccttttttacagcttacaacaagagtgtatgtgtgtgtgtgtgtatatatatatatatatatatatatatatatatatatatatatatatatatatatatatatatatatatatctactactacttataaaaaataaaaaataaaagaaatttccatcgtccgtttgggaaaaaaaaagcgagaaaaacaaaaaagaggaaagaaacatcaatcggcaaaaaaaaaaagtccgacacctctgttagaaaaaaaaggagagaaaaaacaaaaaacgaagagaaaaaaaaatggacgtccgactcccctgtggagaaaaaaaaaagagaaaaaacttctaccgtgaaaaaaaagaaaaaaaacgtcgactccttgagaaaagctacgactaccaaaaaaaaattatcgtccgtaatcttctcttccacttatactactttactttttaaaaatatataatataaaaattgaagatgtttttgccggtactttgatacgtcattcatgtataggtcggtttttaaatttgttcgcttttagaaatacagatccgtatttgagtcagtttttaagtttgttcgcttttaaaaatatataaggaatcctataagaaatcatttttaaaaagttgcatgttaatttgagacgatcgaactcctaattgcgattgcagctcatgattttctaacaaaatatatatccaagcgaaattaaaacgatgaatttcatcttaactaaaccatatctatataactaatataaatattcgtatttttcctttcgtcacatctaatttcatgttaactaaaccatatctatataactaatataaatattcgtatttttcctttcgtcacatctaattttcgtcctgttcgtacgcaatccgtctcagttagcaatagccatggaaaaaattgcaaaaaaaaaaaaacggtggccgccaacgccaccactgccgctggagggagaagagaggcggcggagggagccaccgctgcaggatccgccaccgctgacggattcacccgcggacgaagccgacgccgtcgtcgctatcgacgccgccgttgagagggcgccatcgccgtcgaggccgacggggagagggagagggggagtgggagggacaaccgtcgccgctgtctccggcgcaccccgtcgtcgctgcgccgtgccagagagagatggtgccggtggcgggggaggcggccggcatgggagaggggaagaggcgggagatggggagagggagcggcgccgccggaggggaggggagaagaagcggcgccggtggggagagggggagggggagaggcggcatcgtgggcaggggaggcggccggctggggggagggggagaggcgggagatggggagagggaacggcgccgatggaggggaggggaggggaagcggcgccgatggggagacggggagggggagaggcggcgtcgggtgcggggttggcggcgggctcgggtaggggggagggggagggttagggttatggttttcatcaatttctaactgatctgagccgtccatcaaaacgaacggctcaaatcgatcgagggtttgggccgcacgcgggccggtggtccagcaagtgagatgaggagtatggggtattaagtagacttttacgcttgcgggctaaagaagaaaatgggttgaaaaaggcccatagagaaaaatgatttttatttaaataaatgctgaaatgatatttgtattatcaaaattaccaattaagctatgtaaattccaagaaaatttcaaagagtgtaattaatatagaaaatttaacaaaaattaaatccaaccatcatattttatttctcacacttaatttacttgaaaattaatttaattatatacctaccaacataaaaataccctaatattccagaaaatgtgtatttcatttaattagaatttaatatgttttaatttaactgttgtttttttcctttctgttgcaacgcacaggcacttttgctaaaatttcaaagtgtgtaattaatattgtagaaaatttatttttcattaaattagaatttaatatgttttaatttaattttctcattttttctttccgttgcaacgcacgggcacttttgctaaaccaaacaacacttttggttaatatatacactccgtaatcacccggtgcaatgctcgggcacttttgctaatgtgtgtgtgtatatatatatatatatatataaaagaaaaacacctagtaggaaaacacatgttttactagaaaattaatccgaatatgttgtagacctaaattaagatcacatatttaacagtcaacctgagctacacatacacgatgcagctctgtcacaggttcagcatctacaccacatcaacatcaatcgtcgtcgtcggagtggatcgctgatgacacacgaggactgtggcaagacgaaaacgacggagaactttttacggtacattatactgtcagtatatactagcagtatttgtaagagcatgttaggaatttggcaaaaaattaggaagtattttttagtaattttatggttcagagttaatccaatcctattaattagtactcgttcgcctgcgctgttggttctcatacgtgcgcctgcgcgattccatggcaacggcgccagcgtgattcgacagagaataggcgcgcaacggcgattcccgttcagcacttcagctgctaccgcgtcccttgcatcttgctactgtgttcacgagagactaggcgcgtgtggcggtatcaaatactacatagtacagtagatagttagctttgtcagtgttaaagtgttaatgtttgatctctacctgatggtcatgtactggcactggcttgtgtcatcaagctgtgtgacaagtgacgactagtccatgcttaagcatgcgctgattatgtactaatctattgctgcatgtacctttgccatcttcagattaaattgttcagaataaaatggcagagaacgatagtactttggtctggccatgtagcctaattaggctgcggagtgctggagaatgactggctagttgcctttgcgtaagtgcgagcgattgtggcggcacggcgctagcggggcatgtgattgcgcgggcgtagcagtagcctgacgagcgagacgactacgacggcgatgcggagaatccggggtgcgtgcacgagccgcaagaggcagatcgatccatagatcatcgggcgctaggcaagccataaggcaggagactgctaatctactatttgtctattgcaatatctctagtgttcatggtggctggcggcaacggcgcggcgtggcatgcgccggcgacggcggtcgcccgtcgtgaagacgaaggaatcttggaaggggaacgaacagagacttttttttggctgagctagagcagaggaaacgttagaacaaataaagacaaatttaccctttcaaattttataatgcaatttaattaagtgaaagatcaaatcaatctataccgttagattaattatactagcagtatatactaccaatatattgtaccgtaaaagtgctcaaacgacgaggaccgagcaaccgcacgggttcgataggggatgaagatggggaatatgggatggctgttccatgcgtgcagcactgcaatgtcggcgagtatctccaccgtctgttatgttgaccgcgacttcgcaagcacatgttacgtggtccgtgcatcaatcacgctaggcatgatcccctgaccgctataaaagatcgctaattctcaccagagctggaggttgtgctgctctgccaaacggcgaaaacatgttgatgctgtttagcaatgttaatttcgccaaaaaccttatccaaaacgaggatcattgctaaaattgggatatgttgctgcacgtcttcttgtttggtgactttgtgttatgtagtttaatccataatttggtactaaggctgaaatgaaatgttgctgggccttactgttttcatctcatcaccatgttctgaacttatgtcgatgttcgctgtttattcccatcgattagcagttgtgtcagattaatttctctgtaattacctcagcgcatgtgaaatgatgcattatggcgaccctattttttctccagagttttatctacattttcttctttttttccagtcagtctcgcaaatattactggttgtgaactgtgattgatcaggttgtatagagtgagctgtgagccgagccccaagtacaaggaatttttaaaatttttaatttaaattaattttatttattaaaatattttttttcaaagtttcacaaatctacacatctaacgctctacaaaaacgccctcccaaaggtcattttttatggcgtggcacacacccattggtgtgttgtaacagttacgtaaacattttatagacggcactcttgcagctctctagtgagctacctgtaaaataacgacatacgatattttacaaacgcccccctgcatctctctagaaggacggcaaggggtctacctataaatggccagccatggttattttgcaagcggcccccttagagcaggtacaatagcgagctataagccagctataaacatattttaaagagataaaggaagagagagaagagcagcaggctacagatctgtagccagctgtagcacggactccaagacgtaacgagtgtatgataggtgggaccgggtattaatagtatagtaagcaactattgtacgaattggctattacatcggctctagataatttagagctagtagttggctacactattagagcaagtttaatagtatagcccactactagctctaattcatctatagccgatgtaatagccaattcatacaatagttgcttactatactattaatacctggtcccacctgtcatacacacattgcgtcttggagtccgtgctgcagctagctacagatctgtagcccgctactgctcttctctctcattgtttatctcattaaaatatgtttattgctggctaatagcctgctattgtacctgctcttaaacttgctcttatagccctttaggagggcggtaaggggttgcctgcaaaatgaccggtcaccctacatgtggccattagaatgtaccaacagacgtgtgctacatcataaaaaacgttctctggaagggcgatttaaaaaaaatcctccaagagggcgttaggggtgtagatttgtaaaactttgagcaaaaaattatttttgtaaatattttaataataaaatttaaaatttaaaaaattcaagtacaataccattgctggtgacctggattgccaagcaattttctgcagctggacctatcttgggccaagattagtccgatctggaaactgaacatggctctgcaggccgctgtgccagactaggccgaggcaagatggcctttacaaatcgagcgcataatgctggtagccagaaggggggcaaagcccagctttgcaatggcagtagcaacagtggtacaatgcaacacttctatattttagatcctcctgtcaatattagaacaagttcttaaaactttgatcaccttcatattaaaatcagtttatgaaatatgataacttcatgatattatgatattatgatagtagtatctttcaagaaaaatctatgcatatcttttttaagatcaattttgctacatggcattgtgacttcacggtttttacgtttgccacaggataacttcatgaagggcagctcgagatggagatagatagatgggaaatttgacagtgggctcatgggactttctgagctttcatatgatttctttcttctattcaattaaataaactagctgggaggcccgcgcaattgcgcggctagcatctgtacaaaattatatattttttacatatgattttacttacattttgtcaaatagttatctcgttgtcttaagactttggactgaaccttatcatcccgatgtttctacttttatagtttatataaaagtcacgtcagtcgctatcacttactcctttggcacatctccattatttgcttgctcgatctaccattgtttctatttattctccttgaaaacttaaaaattataccttatactcccttcgttttttaatagatgacgccgttgactttttctcacatgtttgactattcgtcttattcaaaaaatttatgcaaatatataagatataaatcacacttaaagtactatgagtgataaaacaactcataacaaaataaattataattacgtaaatttttttaataagacgaatggtcaaacatgtgagaaaaggtcaacggcgtcatctattaaaaaacggaggtagtggtttttagagtttgttggcttgttaggtttcatttttacaatatttagatgtctcgtcaaacactgctactgtagtcctctatgctctacggttcgtccactgcctctctttattaatattaatattgagattttaaaagtcgaacataattatctagaagtcccgtcaaacgatgccactgtactcctctacagccggtctattgcctcctctctttattaacattgagattttaaaaattgaacataattatctagaagtcccgccaaaccttcagcggctttgccaatgtactcttctatggttcgcccgttgcttcccctctttgttattattgatattttaaagattatacatgattattattggggtttgtttttttactttctagaagtcctgccaaatcatcagtggcaaagccactgtactcttctacggctcgcccgctgcctcccctcaaccattgtgaacattctacttaatgacatgtctatgttcctcctcttaatcttaattgggattctatttggagttttgtttataatttttagatgtcccatcaaccatcatctctactactctacaggcatgttgcttctcatttttattatcgtttgtcattgttgtattctagattgtccttttttttaaaaaaattccatatttttcattctagcattttttatttataaattgtattcctgcatgaactcttccataatttttagaagtcctgttaaacaccgccactgtacttctctatggggcagccactgcctcctctctttattatcattggggttttaaaaaacaaacataattatcgtgttggttcagcttttactttctagaagttctgccaaaccgtcaatggcttagccaatgtactcatctacggctcgcctggtgcctcccctccttattgtttttgatattttaaaaattgtacacgattatcattgggtttattttttttactttctataagtccaaccaactgctataaccatactatccgccgtccctccttttaatcttcattgggattctatttggtttgtttttaatttttagaattctcattaaccgtcaccactctacttctttataggcatgaccatgatcaaactatttagattttttttaatccgagaatttgtaagtctcgagagcaaacttagagacttttttttacattactttattaagataatagatagaatattttatttgtatataattatatcaatcaatatacaccattaaaatctagatcctttaaatacttcacttttttttaattaatatggtgatttccgtccgcttctcagctctgccccattctcggagtatgagctataacatatggaccctaaatatagagaaagctattgggaatcttgttacttagaatttatttttttctaaaaaacataccgtctctaaagattatgcgatagagcaaaacttaaatatggttgaaggagttcggatgcccagttgttttatctcccctacatatgattttgtacaggacgtgtcagttgtgcatatttattatttctaatttagctatgcagacatgacgtgtttgtctcctgtcagtaaattaagtttcctaatttgattttgatttcaaaggctgctgcgtagcacgcatcaaaatctaactccacgctctttcacgtgtccgattcataaaaacagaatcaaagagtcaagcttttacatatattgtgattaaatctcaacccttgtagtctagatatgttaggatctaacggtgtagattttttctttttccccgattaatgtgggaatttctagcatccacctgtcttctttcaaagctgttttaataatataatagatagatagatagatagatagatagatagatattctatggcaaaatttgctacaggatatcaaaaaacatgtaatgtaattagctgtagaacatcgaaaaacctgactcagctataggacacttcaaaaatgatataatttgctaaaagactctaaagccattattttattatttcttggatcaaatggagagaggaattttttagaagacggcaatgccctcagacctctctccttcctcgatcttgtctgcaggtaaaaaagagaaagaaaaagaaacaagccgtcgttgcacatggcccacacaacaacatactccctccgtcccaaaataagtgcagttttgcactattcacgttcaacgtttggccgttcgtcttatttaaaatttttttatgattagtatttttattgctattagatgataaaacatgaataatactttacgtgtaactaaatatttttaaatttttcataaacttttcaaataagacggacggtcaaacgttaggcacggatatccacggctgcacttattttgggacggaggtaatacaacggtgtttcggtgtcctccatggaggaccaccgtggcgagggcaatgatggcggcattcacatgatctctgatgatcgcctaaaacaccctattgataaattgagaacaacacagattttgccaccaatccagctgagaattcaggatggagggagggcacatcaggatggtgttgatcatgatgaggctgaagaggaggaagaggggcctaagctggagcacgacaagcatgagagacactgcatggctggttccgccgcaacttccaatctcgggtcagaaggccgagggggcaaaaggccgaagattttggtcgtctgctcaccccaagcgccctctccacctcatccagtggggggcggtggctcagcgggtggtggatggcaacgaatctgccggcgacgagaggagacgaggagatggacacgatgaagaggtggggtgaggcttgctcgctcctctggaggtttttcatggggtagctcgcgaggactatgccgtacctcatggcagtgcgtgggcgcatccctcctcgtcgttcaacatcgacgcatgatgccgtctccagtgctctgccacggacctgtcctctgcatagcgccatctacgttgtcgccgcaagtgctagatggggggagcgattcggctctaaagggcaaactcgtattttctatgttgtttctccatttgacctaaaaataataaaataatagcttcaatgtcctctagcaaattacaccttttttagagtgtcctagagctaaatcatggttttacgatatctcacagctaattacatatttttttggtgtcccgtagcaaattttgctttttctcggagagatttatacgtggttggctgttttacccacaaaaatcctcatttttttttcacaaaatatacgttctccagcgcaaaaaaaaatatcgtgtgaagagatttacacgtggttgactgttttactgagctcctctttgaaaaaaagtctatttgtccaccctcatctctttgggttatctttgacatggcttgactaagtctattcctcatcttttggaccgtaccttaggaaaaagtatactttaactcccccaactatcgcccgagtatgattcatgtcatttaaccacaaaaccaggtatatcgacttctccaagtattaaaaccggtgcaaacaatgccacttgatggttttggaggtggttttgtctggcgtgacgcctacgtgacggtcttgaccaagtctttgtcctatatggcattagaataaaaaataaaaaaaatgtggaacccatatgtcattcacacaaataaagtattgtgggacccacatgtcatcctccctttccttcccttcttcctgctccctccctctctctcccttatctctctctctctctctccccaagcctttctcttcaccttgggcggagcggcggtgtggacggtggtagggagcggcggcggcggctgccaaccgaagcacgagctcttccccgaagcacgaagcacgagatcctccccgaagcattgtttgcaccggttttgatagctggaggagtcgatatgcccggttttgtggttggaggacatgaatcatactcgtgcgatagttgaggaagtcaaagtataattttccctgtgccttatatgtccgtaataagtctattttggctcccttatcgttggaccgggccaggtcgggcagcccatcgtgacgaggcagaggcctaggcacagcccaaaggtcaggctgtgccatgcttgggctagaccagaaccccgtgctatgggtcaggccgtcgggcctcgagtcttttggctaactatagatgaggaacaaggtgagcaagcacttaaccatttcattaaaattgagatctttattatttgcatggaaatgagctgaagaattgtgatctttgtgtttgcatggatatgaattgaagaaggataatattatattcttggagttcccaaaaggacggtccaatggccgatgaaggcattctttgatgctcggtttactaagttaataaggtatagtctcctgcttaatctgagttaacaaggtgaaccgcaagtgctacaaagtttcatattatgaaaaatttccagtttccatgttcttcgctttgctaaatgaaatactccatccatccctaaatatttgacgccgttgactttttaaaacatgtttgaccgttcgtcttattcataaactttttgtgaaatatgtaaaactatatgtatacataaaagtatactccctccgtcccaaaaaaacaaatctaggattggatgtgacatattatagtacaacgaatctggacagagatatgtctagattcgtagtactaggatatgttacatccagtactatgttggtttttatgggacagagagtatttaacaatgtatcaaatgataggaaaagaattaatcattactttttttttaaaataagacgaacggtcaaacatgtttaaaaaaatcaacggcgtcaaatatttaggaacggagtattatatagagtaaaatgcactagtggtccttaaacttgtcatgaggtttcacttagatccacaaacttgcaaagtgcacatcgaggtccctaaacttggtttatcgtatcattctggtccaaagcgtcgtttgaccgtggtcttgcctatgtggcacaccacgtggatgatgacatggtgtttttttttccttttccccattttctttttcctcctcctcttttatcttcttcctccactggagccacgtcgagctcccccgtgccgaccgccgccgtcgtcacgtagcgttgctgctgtcgaaggaagaggctgaagaagagagaaatgaaagaggaagaagggagaaaaaagaaaaaataataataatgtgccatgtcgttgtctacatggcatgccacgtaggcaagatcacggtcaaatgagactttggaccgggatgatataataaaccaagtttagagacctcgatacatactttgtaagttcgtcgacctaaatgaaagctgcttacaagttcaagaaccaccggtgtgttttactctattatatattacaactttaatggagcagtttgttgccaacaaatgctaggtatgcacaaatattcattcgatctgttttcagtattgtgtcgcccctctgcaactacgtgacttctaatttcagcatgattttctttcaaaatgtaaatcatatgaatatttacttgtttcttagtttcttttttcaaaatatatcagggagatataagataattattaatatgttagattatgcactctctgttgctatgaaactacaccaccattggtcagacgtatcaaggatttctaatatctgtttcctaagcaaaggagaaaacaaaaatcattaatgttttcattcctatcaccgtatgattatttctacacttgattattttgatatctttcattcttgtatgctctttgcacctgatccatgtagagaaaaatctggtaggactaattgatatgcacctattcaaagaggttaatatggattgtggccaagccacatactcgcactgaccctgctgtaaaacggcaaaaaaaaaaaaatcttatccttgacgattggcttgaacaataattaagaatgttatacctgctttcaggtaagtggtctgttatttttgaaatgaacaagcggttaacgggacaagtgatgatcaagttctcgctccaaaaaaaaaaaaaagaagaagaagaagaagtgatgatcaagtgtggtgtgcaagattttgtcacgctgtggaaagaaaatgagaaagttgacattgttgattcactgagaggtgtgttattgtagtattcgtgcgtgtatttttgtccactcttaagaatgattcttgatccatgcatatacttttttttcttttttttttaaccttgatggaaggaacgttgaatgatttgttggtttttgcgtcatggaatgaattttgtgcattaactgattagctaagttacttgttgatcatacaaggaattaagggtgtgttcgctattcctggatcccaaccggatccctccgcacgaaaaatggagcgatctattagcgcgtgattaattaagtattagctaatttttttttcaaaaatagattaatttgatttttctaaaacaactttcctatagaaacttttttttaaaaaaatacactatttagcagtttgaaaagtgtacgtgcggaaaacgagaaagatgagttgggaaaaatggtatccgaacacaccctatgtgtgggtatcgacgtattgatgtttttaaaaaatcccatatcacgatatcaatgtatccatatcgtcgtagcagtatcgcgtatccgtgcatcaccaatggcggatacaaagggtggtccgggtggtcccgggaccaccaaaaaaagggcgatggaaccccctattaattataaaaaaaagaaaatagcgacaattgaaaagaaagaaaagaaagcgacataatccatattccctaatgccgacgcgctattccctaatgatggctccagagaccccacacacgcgtatggaatcgatctgatcgacgcgatcacgactctctctgacgcgatctctctgacgcgatcacgactctctgtctctctcctcatcgccgccctagcccgtaggccgtagcaactgccctaggccctagcctggctagcgacgccgacgagccgacgagaggagagacgacgcgtcgacgccgcgacggcgcgaccacgcgagcagcccccacgcggccacggccacgccgccgcgcgcgacgccgtgaccggcgacctgctgctgtcctgctgtctgctgtctgtttaatagtgttcgtcagttcgtgtgccgctggacgccgccgcgaggagccgtcgtcgagccgatcagccgcccgcgccaacacaaggtaacaattttagttttaggttttctaattgtccacctttttcaatttttagttttaaaatcttaaactcttgtgcattgtgagattaaattgtagtattatattgtagattgttgattgttgaatcatgaagaaagatggagttatcgtatcgctttttctttaaagtggatgaagaggatataatgaacactttcatggccattagaagacgtagacccgataagaagaaaaagtaatatggtaattttctttaagctttcatagccgtacaagcttctttaaatcaaaattttacttaattactaattttatatattttaagatgttttgttaatatatcatggtaagtttttgataatttgatctattttattacttatagttacattgtatatattagtatcgttaggtttactgtgtttagaaaaaaaattttaggtcggaccacccatatcctaaattctagatccgccactctgcatcacaggtgaacatccattgactgatcgacgtttgccaataccggtcggaaatttgaagatcatattaacatgccgtgttgttgttgacattgcccaagtgcatgcccacgaaacttcgaggaagcttcgtagatttgccattcacggcgtaacggaacaccggaaattgtcttaaaaattgtcaccatccacatgcgtatccatcgtcggctggaacaccatggtcggctggaacaccatggtgctggaacaccatggtcggctggaacaaattcaacttcccgtatcctagttgactggaattgaaggtacaatttccaacattcgcttccaaacaaggcctataaagtcccatcccctcgacctctcgccattgtccacctgccacgtacggcccaacccgccaccgaattcgattgctccagtgaccatggacgacgctggcaacagcagcaaggaggcggaggcgcaggcgccggcgccggcgaaccaggcccctgccaccgccgccgccgccgcccgcggcgcgattcatcgcgggccgatgctgcgcctcgccgcgatgcagctgatgctgttcgcggcgtacgagatcgtcagctcgtacgccgcgccgccagtggcgcttccccgcctcttcgcggcgttcgtcgcctggctcgtcggctgcctctcgctgtttgtcgcgccgccctgaagggctgcacgtttcatcggaggttgaaagcatagccatcaggtattcaggattaatctatcagcatcaatcatcagcggtagtgtggtgtaacggggctcgttttttgttttttttttcttctttatgtggagtgggagtatgacgttctgcaggtttatttatgttgaccactcgttgtttattcggacttgtttgtccgtttcagcagtaggctactgttaggctgcctgtatcagatttctctgcacatgagagcaggtaaaatagcatgctattagccagctataaatatattttaatgagataaaagataagagagaagagcagcgggctacagatctgtagccagttacagcacggactccaagacgcagtgtgtatatgacaggtgggaccgtatattaatagtatagtaaacaactattgtatgaattgactattagatcggctatagatgaattggagcaggtagtgggctatactattaaacttgctctgacgcggcttaatttttttacctcaaagcgtttgatctaaatgcttttttattggtcagtgtgagtgtgacagtttatccggctacgacgcagcgtcgcaggctcgcagcgctgagcagcagcagcagagcccagtgttttggccgagaccgagcgtccccggccaaaacagtacgagcaaagctgatgctaactagtactacgagcaaagtgtgacagtttatccggctataattctgtcacgagcaaaaataaaattgctactccctacgtttcacaatataaatcattctagcattttacacattcatactgatattatatgtctagattcattaacatcaatataaatataggaaatactagaatgatttacattgtaaaacggaggaagtatacgagagcataagaaacaagaccaagcaggagggcgatctagatcaccatgccattttctgcaactggacatgctttggaccaagcttgtccgatctggaaatagacaaaggctatagatgttgttgggtcagagactcaggccgaagccagataaaccgagccccgaaagcccacataaacaggggggcaaaggcagtagtagcagcggtattaaactgtagtacgctaccgttatgtgcaatcggttttgttaaatcatattcaacccgcaaagacagaaacatgcaaatcaagcaactaatgtatatcaagaacaactggttggatgagcttgcagcatcatgcaatttattatggcacattcctcacatcagactgaaaaactgattcagtgattccacaagcagaatagttctacacaaccaaaactgaacttcaaaacatatgggacagtatcaggtatatctacactgagcttcgatatctccgcatcccgtttcccagaaaccatcatcactagttcactcagtcttcaattatcctttttttaaaaaaagttcactcaatcttgattctcgatcagcttcttgactatgcttttaagagctggtgcactagcactgcacttctgatcgacgaagcatgacctcccttcctcagccgccttgcatagctgtggatccatgggcaccttgccaaggaaaggtactcccatttcgttgcacattttctccgcaccacccttgctgctatcaaacacctcgctgcatgcaaccattgtcaaaagctcaggagctttctccttgatatagttcagcgcccattctgtagcatccatctcgcctccctcaccttgcttcacgaatctgaaatctgagagaacctgccgcaagccactcatgttctccacaacacctaagatcggcacaccaaccttcttgcagaaatttatttccttccgcacatcgattagagagacctgctggggagtggtcacgattattgcaccatcaattcctgtggcttgaaggtactgaacgattgaaatatgttcatctgatgtccctggaggagcatcaaccacaagatagtcaatctccccccaatcgacatccttcaagaactgtttgatgagtccgttcttgcgaggtcctctccatataacagcatcatctgggttgggcagcatgaaaccaattgacatgacaccaaggttggactccacatagactggtgaccaaccaaggttgctttgatgaatatcctgaccttcaaggcctaacatttttgggatgctagggccacatatatctatatcaagaaggccaacctggcagtccatttcagcaagggcaaatgagagctgggctgaaaatgtactcttccctacacctcctttcccagacagaaccagtatcttgtgttttactgtagccatccgttcaacaataccaaccaagtctacaaacacaatcaggcaatacaatcaataattatttcactgtgtggacgaaagcagcagtaattaatattgtctatgaataacaatcggtcatggctaaaattaggaatgcgagaagtacgtaggaaagaaacaccaattatattcatgaaagaatttacttgttcaactacaatttttgtaacatgaacttgtcttcctaggtgctcaatcacatgagttcctttttttaagtggcaatactgctgtgaaatattttcatggataagtggatatcactagatgtgttctccgtattgggtttccaacaaagttttttctttaacattcttgatgcactccattttttgtatgttaaacatttaagtatttccgagtgccattctatttagaaaaggaggcagctgtgtttcaactttcaggtgggacaccagatcatgcacttccatttctttccctctttaatgttacactcacaagtaaaatgtacttcctgacagtacattagatttggaaaatcagtaaggaccacatatttcttcatgggtttgggattgggtttggctccagtgtagtaataaactaatgatcatcatgctttcaatgtcagccccaagccttgctacctccatcactcacgttgcttctgtttttttaaccatctgaactatctacctaagaacctacaaggtgtttggttgtactgttatatatgcaataaggtagaacaatagatttatgaaatcacataaaaaacactgaagacatatcattgtggtatatggcatcttcatgcccaatataaaacatcagaactgacagaacaaagctggttggtaaatatcaaaggtaaaaactatccataaggcatagaacacaatcaacatgatccagctttggagctggtagattagagcattgggcctcaaacccacatcgcacacacccaacaaaaccatacaatgagatgaggagcataataaatactttcatcccgctcctatgaaaaattttggatgttgactactaacaaccccaattttcttccttcagcttcaactgctcaacttattcatacgagtgctcttgtaagatgtatcaacagcgaggaataggtatctgtgtgcctattaattttaattcatccatctcttttccccaaaattcacaaaacaagacacaacaacccgaaatctgataattttaagagaggcccaaactgaaaacactgcagctatgtggcacgaactaaattaactctaaactatgatatatgcagggaaatagcaaacaggtatcgcacaccccagaaagaacgatcacatggaaaaattttgccagaacacggtacaacaacaattggtcaagttaccaggatcagggcccttgggggcggtggcgcaaatctgctggttggggcatccggcgcaggcatccgccttccccgcctcctccgactgcgtcccagggcaatctgcagaatcaaacacttatcgttagggttgcgcatagcagacacccatccctttttccattgcaaggcgatcgaaacccacaccaaaccgaacggaaacaggggggaaaggtagcaatcgagtcttacgctcgttggcgtccgccgggacgtcgctcttgccgccatcgccgccgccgccgccgccgttctccatctccctcgccgcctccaactccgcctctcgagttctcgttactttctcgcgaggtttgctgcctggtttggggacttgaagcctagagagcgacggaaatgaggagaaaaggagtatttgtgagagagaagggagaggctggtcaaagaggatatggagcgtccgattgtgatcgaacggtccagataccggttgtcaaggacaagtttgcatctcgtattctcgttgcatatccgtcgcgcgcgctctctctctctgtggattatttttttccgtgattttttttcccgtggttgactttattcctaattaaaatataatggatgatttcatattttagaaaaaaaaaacgaggtgatccaaagatattttaactactctagaagagcaaataatggacccatcgtagtagttggcaaagtatgattcgaccataaatactctcttgtttttcaaaatccaaaataaaatacagtcacaccgtgaaactataattgggtctagaaaataccaagacttttaggatctgcttggaagattagcccagagctaattttgaaaggtaatatttagtcaggaattggtaggctaaacattagcctagggtggtatgtttggatccatgggctaatttaaggctaaaaggtggagagagagtagaaagagaggagagagaaggagagagagaggtgctttttgatggtccccacataaaattagccccattagcacctcttggaggggctaatgttttgagggaggctaattcacattagctcaaaattagctcacctgtttggatccttgagggctaatttgaggctaaaaggtgaaggataaacattagcccatgaaaccaaacagagccttatgctttaggattggttgtgttcgggctaattggggcaaagaagataaacaactttcttgatctggtcaaatccatcatttccccaagcatatttttagaattaaacttttcacggacatggacccatcaacatgacttggccacaaagtactttctttattctccacaatcaaactcacaatatatatataggccctgtttagttccttaaatttttttcccaaaaacatcacatcgaatctttggacatatacatggagcattaaatatagattaaaacaaaaactatttgtacaattaggggaaaaatcgcgagatgaatttttttagcctaattagtctatgattaactatacgtgctacagtaacctacatgtgctaatgacggattaattagtctcaaacgattcgtctcgctgtttctagccgagttatgaaattagtttttttttattcgtgcccgaaaacccctttcgacatccagtcaaacattcgatgtgatatccaaaaattttattttcgcgaactaaacaggcccataaacaggttgtgaaaccgatagacatgataattgggtcccacgaaatattaccaaaccatcaattagtatactcaaatatagaacatttttaaatattatcacatctgttctaaaatatagtaacataatactaaataggacatattaatactacgaatttgaaccgataatgtgtcacatttaattatatgtctttctctggtcatataatcatcctccccagactttaattttcactataagagctagttgatgtcgttcctggtatctaaaggggataaggcggcaccatcagctgcttaactttgacttccagtctcccaccacttcagcttgaagaagtaaacatgactgataatctggcatgtgcataagcgagtctgtatagattaatgatagataccctaacggcaactgtatggttgaaaaagacataaatattagagaattatctaatatcaaataattagaaggagcgaggttttgaatttagattgtttagcccaccatctagccggcgagcatttctccgttatggttgaaaaagaaacagaagagggaaactacgattcgatatgatgagacgcagacactaatcaaaccagactacaagataaaagtacggaatactatactggtacagcactagtgtagtaacaacgacacaaatgacacgattcgttgtacatgtactaatcgtactgagctctgcaaaagcgtgagaggctcagagccacggcgcgaacagagtgatgcacccaacgagccaaatcagcagctcggcgagcagccgaggccatggcacccggtcccccgcgcccgcggacgcgccgacggcggcgatgatcatcgtggcgccggacaccatcagcaggaacgcggcgcgagtggtggctgcgcctccgccgcggccgtcggcgtgcggtggctctggctcttcgccgaaggcgatctcctcgggatccatttgccttggctcgagatcggccgtcgatgatatgttttctactgtatttgcctttgtgccagagcgtgtgcaatatatgttccagatcgagctccgttggcagtggcaacgaccatttttatatacgcatcgagggcaatataggtgggaacacagaatgggcccccggttgaaacgataagtcaatttgtagtataaagtccatgcgagctgtgtgcatttggccgcttcttgtgttgcgttaaccttttctagtcaatttcttcactgtttctagcttactggctggtttgacgctggtacgttactttgaaataagtattctgttatacctgcaccaatgcgcggtgaaatcactgacaggtcggtccgatacagcacatcgacccacttatcagtgataactccaggtcgtgtagagctcgcagttcgtacgtgtaggaacgtaattgcgtacggaggggaggaacgtgggctggattttttacattttgatccttttgaaaaacttatttcgtaaatagacccctaaaaaaacttatcccagaaatggtcctttttggggcgccagagtggctggcgccgtcatccagcctctctggcgccgtcctcctgccaccgtggtgcacgcgaaccgacgtggcaggaggagggcgccagcataccatgctggcgccgccccagggaggagggcgccagcatggctggcgccgccgcctccattcctgtttctctgtatggagttgcaacggtgtcatttttattttatttttttggatgttttttcacactcaggatcatgatacaaccaaaaaaaaaattaaactcgaactaccacttagctaagtctgaaaatatctagcataccacttagtctactttgcaccttcactaaaattagaccataaccatagctcctttagtaaaatcctttgatcagcatgttaaacataatgcactctaccaccatatgaaattacttaatctaattcaaaatataaccacatgaaatgagatatataagttaaacagtacatatagatgcaatttttttatttttattttattttttttttgatatttttttcacacttaggagaacataggaaccaaccgtataaaaaataaactcaaacggacaaaatatgtgacatgtagaattttccaaaactctaccgaaacggacaaaatatgacatctattaaaataggcgtaactttctcatacggactcggaatcaggcaaataatatatgcacggacatctacagaaaaagttacatccgattctcccccgctttgccgggttcggcgatattaaaacctccaaattccgcttgcaagattgtgttttcgaggagagaagtttttcggtggagctttggaaaattccacatgccacatatttcgtccgtttgagtttattttttacgtggttggttcctgtgagtttctaagtgtgaaaaaaatatcaaaaaaataaataaaaataaaaaagttgcacatctctctcctctgcactagttcggagagaggagaggagaggaaaaattctacatgtcacatattacgtctatttgagttcaatttttctatggttggttcttgtgtgtccctaagcgtgcaaaaaatatcaaacaaataaaacaaaaataaaaaatttcgggggggggcgccagccactctggcgcactccccctagccacctcagcatcgccccgccacgtcggcggtgggacggcgccaaagaggctggcgccgtcccgttgaacgacggcgccagccactctggcgccccaaaaagaaccatttttgggataagtttttctagggatctacttgcgaaataagttttttaaaaggaccaaaatgtgaaaaatccagggaacgtgggcgcggcaaaaggaacaggttggtggcttggcgtgacgggggtggattatgtggctgtggccctgtgggatgtcagtgccgcgttccgcaatcgctcgctcgctcgcccgcccgtccggcgccagcccgaacctgctaggaaacttcctcgggttcaaaatcctcaactttgccaacagaatcgccttacttgttgtttcacacctctcagaattactttcttcctcctggaaatgctgtcgttttaaggttgagtgaacaaattagcgacaagtaaaaatgaccatattaccctaaaccctaaaccctaaaccctaattaccctcatttaattattgcatttgtcacttcagattgtactgtagataattaactaatcacttctagcagaccatctatcgcattgcacagacatgggtagtactagtagtggcaccgtagtatactaaatagcaggttcaaatgaatcgatgggatagactaggcttagctcgctggtcaagatgctacaacgacaaattttgtgggacatttttctgaacagcgggatgactagctttctgggacggaggaagtattattagagcaagtttatttagtagtaaagccaacttttataaacttggagcatcatcgagagattgtgtatcatatcctactaaaaaattgttttgggtttcctaaactgaaaataataagtaaaaaaataatctctccaacagaaaacctaaattttatttaaaaaaactaaaaatgggcccctctattaaattacggctgaatttgcaaaactaaaaacgggcccctctattaaattactggctgaatttgcgtttttcttcacgtggaaaacattttggccgaggagtgaaggagaggacaagcttgagagacaggacattgggagtcggagaggagcacttgctttccctcaaatcaacatagcgataaatatggggaactccaaaacatgtgcaaggctagggatcattggatccgatttttcacctaaaagccctcaaaatcagatttgggaagaatataagagaaaggttggtgatgctcttattccctccataaaaaaataaccttataatacgatgtgacatatcaaatttggacagatagtatgttcagatttgttatactagaatatatcacattctattatgaggttgattttttaggtggcttatactccctccatccttgcagttgtgggtttctgtgtatagcgtttaaccgtccttcttatttgaaatttttgtaattaatatttttattgttattagacgataaaaatactttatgtgtttttcaaataagacgtattgtcaaatattggacacggaaacccacaactacacttaaaatgggacagatggagtagtcgataagttataaggttatttctatttttctcctctctatctctcgcctatgcatttaatgcatttattatggagtatgtgatagatagctcttgcatgagaaccaactatattcttttttttttcaaattttctcttatccacgtaagcttatactccctccgtccaaaaaaaaaggcaaaccctgggtttccgtgtccaactttaactgtctgtcttatatgaaatttttttataattcgtattttcattgttgttaaatgataaaacatgattaatattttatgtgtgacttgtctttttaatttttttcataatttttttaaataagacggacggttaaatgttgggaatcacggtttgccttttttttttttggacagagggagtagttggctcttacaggtatgtggtgtcatgggtttagtcagaggctcatagcagcagggccagaccaccaaaagttcttgctgaatttcggaactgaatattcagattgaggcacgaagactttttctgaatcaatgaggcttttagcgggattacttaaattatgtcgtcacatttttcacttccatttttttccatatatgattgtcctctctccgatatttaagctcttccatgtagataataaattgtttaaattataattttcttatatattgtgtattagaaaattttcgatgtaaatattaaaatatacattgtaattatagtataagttttataattttcaacgtaattacatgtaatgtaagtataggtaatttacattttttaaatgttcttactgttttttaaaaagaaaaatatgatctattgcagctactcgttcagatagaattaagcagatgcaaactgcaacgagcactgaaaaatgttggctttgcctatttggaggaatgagtctattttgcctccctcaacttttgcttcttattgaatcacctctcttaaccacaaaaccatataggaataacgtctccaccatcttcgaaaaccggtgtaaattgaccactttggtggtttgaaaggcgttttttttttgctgacgtggcgagttgatcatggttgactcactgaatcatcgagtaaacctcacccaacagggactctatcttctttcaacgcgacgagctagttggggggggtccacctgtcgccctttgcatctgttccttttcttctactctcttctttctctcctcctcgctcctctcgaacatggctaagtggcacggcggcaatgaggcaaaaagggcaacgacgattggcgatgggtgatgcgggtcttggagaagaggcttccggattggcaacgagcagtggccggaggagtagcgctcgggcgtggacaaatcgatccgacatgggggcaacgttcgagctcgtggaggcaacaatagtggaggtgcaacggcaagggggaggtcagcatgctggggttatggctattggagagcaaagatcgctagtggtgagcgggctcggcgagaggtggctaggttgaggagatcgagtggtggatggcattggtgtggggaaaagggcaggtggaggtcgagggtaggaatgcctcctacccattgccatcaccctttttttgccttattatcactgtgtcactcagcaatgttcgagaggagtgaggaagaagatgagtgacgaggagagaaagaagagagtataagaaaaggagcatatgcaaaggccgacaggtgcaccccacgcttgcccccaccttcttggtttacccacacaagaaagaaaatagtccatggtaggtgggctccacttgctgactcaacgtgtcaactgtggtcaacctaccatattagcagaaatcacatcctaaaatatcgaaggagttgatttgtgctggttttgaaagatgggggaggcgttattgtcggttttgcggttgagggatgcggttcattcaataggaagaaatgaaggagagaaaatagacttattccctacttgcagcatctcattggaggtccagtacgtaaggcccactacccaccacgtccacacactgcaggccttaaggcccagtaaaatatggaccactcacgtgggagttctgtttgggcccaacaggtacttggggacgccgttccgacccaaattggcgtggagtgcaaaacggcccgctcttctgctgcttgccagaacttccgcatgatctctctccagctctccagccgtccgagcttctgaagcgctctgctacttgttccttgagagtttgagacgctttccaccatccagccagcatcttgcgctaatccgctgccgccgtgaagccgatccaccgatccacggaccacggccgtctttttggcttcatgcctccgacccgccttctgctcggacgcctcctctgcgcgaccatcggtgcttgatcttttctttttctttagacaatgataatgatcggtgcttgatctgaccatgtattatcttgtcggcgtcagattaagcaaactgcactttcatcttctctgcattttaagcaaacggagtattaattaattaatttcggaaacaaaatggtaccaatgggcacggcggtagccatcagctgccggagatcgaaaagaggtgggagaccgaagatacagctccgatacaggtcacgggtatcgtcgggcttctcgagaaagcggacggccgccgcccgccggacgcgtgcctcgcgagatgatcgagctggccgttgtcatcagactgacgaggaggtagtagtgtgccacgtatgtatagcttcgcggcaccccattccaatcaaatgatccttgcgacgtgaaccatccaaagaggatcggtggaatttcgacttgcacagccagcccattcctgcaaaggcttttatcaacttctctccgttcgaaaaagggtttatcacgagtgcacattcaacgtgtacacgtatactacatggttcgacactcgaacagttctttttcttttaaagatgttcgaacgtcagttcgggcaaacaacgttatctgttttttggagtgcacattttacaatcccgaggttgcgatatgtggcccaataatgtgcactctgctgcattcccctttggagaaggttggatcagatgtagtatagggtgtgtttatttcacgctaaaattgaaagtttggttgaaattgaaacgatgtgatagaaaagttgaaagtttatgtgtgtaggaaagttttgatatgatgaaaaaattaaaagtttaaaaaaaaatttgtaactaaacaagaccataatgtattaatcacttgcgttgacaacaattggcacactcaaactccacaagccatctcatacactcctattatattattattagtagtattttttgctgggaacattaggtacagtctactattttaaggaggccaaaacgaaaagcacatcctcttttctttttctttttaacgcattgacatgacagtgtagcaccaacaacttcaacaccagcacgatcaagcatattctaccatagaaacttcaacagttcaaccaacatcagcatcaactcctgttccgttcaaaagaacgtccaaactctacctaattgacaaatgatttcaccacgtccctttccattttcccttgttttttttcctcctcgaagaggtcgctttctgtaccgtctggaagacgtcatgtgttcttactatagaatgtccacagaaaatcctgcattccacggcggccgaaatccaatcttgccgatggtttggtttcctcttcctcactttttctttctttcttcctctccaagaagacaagtcacccttccccacgcccctctctctcctgacgagtggggcccaagtcgtgcggtcatagactttttactactacaaccaacgttcgcgacccaccgaaagttccagaaatccaccgctctccgggccccacctgtcgccctgggcccgcatgtcatacgcgtgcccgccaccgcgctgcgggcgccgcctctcccggtgggtttagaaactgtgaggccgatccgcataccgcggcggccgtggtgggcccaccgtctagcgaaaaccacccccgccgccgcgcgtgccacgtttactcccgtgggccccgcaacgaggcacaaaccctaggccgcttatataaacccgacccgccccgctccggtgatcggatccccacagctttgcgtttgcactcctctcgatctccattcgtttttgagttcctcgtttgctccgcctctctttcactcatgggtaaatccgccaatctttgattttattttattttgagtttgattttgggtttgattttgtatgtgtttttggctgattggtttgtgatttttttttttttggtttctctggaatgagcaggcaagattaagatcggaatcaatggtgagtgttcgagcatacgattggatctggttattttatggtatggggtttattcggtgcggatttgtgatggatttttttggtttggatgatgcagggttcggccgcatcggcaggctggtggccagggtggcgctgcagagcgaggatgtcgagctcgttgccgtcaacgatcccttcatcaccaccgagtacatggtaccgtctctttccctcgcctcccccgcgaattagttgatctggtgcttttgagaatgtatgatatgatgattgtgctcgcttcggttaaattgaattgcacgaattcggtgcccatcaattgggattgaggcatcctggtagatttgttaggactatttgttataaaccttgtttggatttgtgatctgcagtactgtagatgtcactgtcgttctgctctgatggaccacaacgcactctgtttataccatggattcataaatgcaattcttgtctgctttgactgaatatttctgtagatccatatagtagatggtttgtgttcatctcttcttttatctgatggtgctatggatgggatgattggtatgagtctattacactacagtatttataaagtcatgcagacatgcatactgatgtgggtctcttttgcatgcttcaatgcatttagaaactatgtgtagttgagtacttgaatggcgttcctacctacaagacctgatttccttgatagtacagaatgctaattttggtttgatctgttgtatatgctaaattggactgtcgttgcgtgcagacatacatgttcaagtatgacaccgtccacggccagtggaagcatcatgaggtcaaggtcaaggactccaagaccctcatctttggcacgaaagaggttgcggtgttcggctgcaggtttgttgccatccatttcagtatcatttttgttcatctgctcacaagagttacagccagtctgataagccaatattctgatgtaggaaccctgaggagatcccatgggctgcggctggtgctgaatacgttgttgagtctactggtgttttcaccgacaaggacaaggcagcagctcacttgaaggtacattcctgtgtcaatttttctgttcagggtcaagctgtagatctgttctcaatcatttttcatatgcagggtggtgccaagaaggtcgtcatttctgctcccagcaaagacgcccccatgttcgttgttggtgtcaacgagaaggagtacaagtctgacgttaacattgtctccaacgctagttgcaccaccaactgcctggctcctctcgccaaggtgtttattctgatataatttggcgcctgctcctgtgcgcatgtagctactactggagttttaagctaacattttgtcttgttacaggtcatcaatgacagatttggcatcgttgagggtttgatgaccactgtccatgccatcactggtaggcatcactttgcttaatattaatattggactgagtaaaacgtttggtaccatctatctgatctgatttcaattcaagtgattaacatttgaattcctacagctacccagaagactgttgatgggccctcgatgaaggactggagaggtggaagggctgctagcttcaacatcattcctagcagcactggagctgccaaggtataaacttgtatttctgtatgtattacattgttgataatgtttcgttatcagacatttgcacctaatattgatatgtttcaaggatctcgtggtatcgttttgtatttactttataatgcaagtataacattaaaaaattgactttccactccttgctagtttgccccccttttcctttgcaaaattaaggtttgtttcgttgcctgccaaataacagtagcggtgtttaatcagatggaatgatggatctcacaaaatgtggcaaccaccttatttttgttgtgttttgttaaaactacactgaaccttctgtatcgggcaccattaaacctgtttatcgtgtactcaattagttttactcaatttctcataggctgtcggcaaggtgcttcctgccctcaatggaaagctgactggaatggctttccgtgttcccacagtcgatgtttccgttgttgatctgactgttaggcttgagaagcccgccagctatgaccagatcaaggctgcaatcaagtgagtaattcttaacaactatgggctctgtaaatctttatgaacttctgatttctggaccgagaagaatctgcttgtgttttcagaaaagaaaattatttgctgccttgaatgtttcactaattttgctacatcttctcagggaggaggctgagggcaagctcaagggcatccttggatacgttgaggaggaccttgtttccactgacttccagggtgacagcaggtaaatttacccattgcagtttcttgtataattatgggtcatattggttacctctaggctcttgctatccgacctattaatttaccaaaaaaatgcacttatccatcacaggtccagcatctttgatgccaaggctggcattgctttgagcgacacgttcgtgaagcttgtgtcctggtacgacaacgaatggggatacaggttagtgtgtgctgcattatgaaagtgtaattctctgttacatgctcacgacagtctgcttaaaccacattttcctctgattgcagcacccgtgtgatcgacctgatccgtcacatgcacagcaccaactagacgagccctcctcatggaggcctgcagatacaggggagttgtgttttgccccagagaagagtagatgaagcctcttccgagaataaattttaaattctgtatggttttatgtccgtcgaaacctaaaactatacttggttgtatcatggtggttggttgggcctggtcatggctcatattttgtgtctaattttcttgcgcttaatctaaatcgaagtgttgcttcgcagatgcatttgctctgttttctggttgcttcttaaatacgcgcgccctaaaccctatgtgcgcgcgccagagtttcttcctgatttacaacgtttgctgtttagtcattggccaaaccccttagagcccaccttgattgatcgaaacccatctcctccatcgataaaaattggacctaacttatcgttaatgcaagtgcattgtctcgctggggatgagaaaaccaccagcaggtcagcaagccaggagctacttctgtccgctttgtctctagaatttgtagaatgctcgttttcaacggaaatgtggactgccatcaggcctcaattgtgaagtctccattgcacacgaggatttatctctagaatttgtagaatgcccgttttcaaaggaaatgtggactgccattaggcctcaattgggaagtctccattgcacacgaggattgaatcaaaaaaaaaaatttgaaggacgaaataagcaggtgttccagaatgattgcaggaactgataaacaagaaaattgaagaattgtgaacttggaggtacagagtttctgtatctctgttctgaaaactgaagaattgtaaacttgaggtgagactatttctctgcccctgctctgttttcttctatcttggcattttagctctgtaacttgctcttgttttatcgcacagcctgacctgttaaaacgaaaaactgcacgcacaataatggatgatctctatcacaaatgagatcgaaaatcatacgttcatttctgacaagaagtcgtacgaaggagatatgaacagcaaatttattcagtcacaacgatcacatataaagcatggaaatgcagagcagacagccagagaagcagagcgcccaacggtgtgtaatgctgctttgccaacggcgggtggtggctcactgcaagggcacacgaacaatgggacacaaccaaagtggattcttccttcccacgttgatgcctatctcctccgtcatgtctagttcgttcggcgcaactccttcaagaagctcccatttaaagtggtataagagcgtagcaagcatgagctccacggtggcatgcccgaatgtcaccccggggcaactcctcctaccagcaccaaacggaatatactcaaagtttgcacctttgaagtcgatcttgccatcatcgaaccgctctggcttgaacacctcagggtcatcccaatgcttggggtctctgttaattgcccatatgttcacaaacacggtggtgcctttaggcacgtcgtagcccatgaccttgcacgcatggagacactctcttggaagaagcaatggtaccacaggatgcaaccttagagtctccttgatgataagctttagatacttgatgttaactaagtcatcttccttcactggatgttttccttgaagggtgtttcttgatggcccattgaattatatttgaagatgtatcacttcccgcaccaaatatgtcctgtataccgatgtagaatttagtaaattgatttaacaatgtcaagcaaaaaaccaatgtgccactgatgtacattcatcacagtactacttccggtagaaaatatatgacgttttgaagaaggtccagccaaaattttgaaacttctctcattaattttcataatacagtttgaaaacataaaaatgatatttgtagatttgtcctgaaaatcaatactttcatagtcctacagaacttactattagatttttttaacttatttgtaatacaaatctgtggtctaagttgttcttcaaagatcttaaaaaagttaaacattgtatatttctttactggagcattagcaaatgtgcttaattacctggataactgctttgatattgtccatggtgagaggcatgtcgagggcaccttccttctggatcctgaggagagtgtccagcaggtcctcctccatggcgccgccgccaccctgcgcagccatggcgtcccttacctgctcgtgctgccggatggcgctctcgatcagctcgttccccttccggtggctcgcctccgcgcggcgcgtcatgccgccgacggcggcggcgatcctcgacgacgggaacaggtcgtccaggctgaaccccgtgaagctcctcaccgcctccgtcatcgactccaggaactcctcccgcctctccaacctgtccccgatcaccacgcgcatcgtcgcgtccgccacggccgcggcgaccagcgcgctgacgttcacggcgtcgcggcgggccggtggcgacgacaacgaggcggcgacggccgcggcgaggttggcggcctcctcctcacgcacgcggcggaacgagcgcacgcgccgggcgctgagcatctccacgatgcacaccttgcggagctgccgccacatggcgccgtagggggcgaacaccacgccctcgcggtgggggcgcagccggcgcacggtgggcggccacggacgcgacgcgaaggcggcgtcgtgcgtgcacgtcacctcgcgggcggcgtcgggggaggacgcgacgacgacggggacgccgccgagctggaggcgcatgagcggcgcgtcgtcgaggccgcgcgccaggtccgccatggtgcggtggacgagcgggccgcggagcatcagctggtggaggttgccgatgaccggcagccgccacgggccgggcggtggctggcgcaggcgcgcgccgtcgccgccgcgcccgcgcttgcccccgatcctgacgaggagcaggagagccaagaaggcgcagatcgaccagcacgcgacctgatccatggcggtggaggccatggccatgcaatgcaagcgaccgcgttctggtatggagcggtgagtgcaactgtgcaagatcgccgtgcaaagctcaagcactgcaagcctatatagagaggacggaagtggatcttttgactttgtgcggtttacagctcagtaattaacatgtaaaccatattttactgtatttcacgtgtcagtgacataactataaactatacaaagtctaagggcacccacaatggttatctataggctctctataagagatccatgtcagcatattttcctacttggaagagattaaatgaagagagagagcaaagctatctactaacctggagatagtctatagagaaaaacgagacaatatattagagagctatagatacccatgtagacatactattgagatggtttactattaatttagtctattgctgagatgtacatgttttatagatagcaccttactttaccattgcgggtgctctaagaagagagttacatttacattccacgatgcgctacgtgatgaatgctggtgatagatagatactccctccgtcccaaaaaaagacaaaccgtgggtttccgtgtcaatgtttgactgtccgtattatatgaaaattttttataattagtatttttattgttgttagatgataaaacatgattaatactttatacgtgacttatctttttaatttttttataatttttttaaataaaatagatagtcaaacgttgaacatgaaaactaagtttcgttttttttcaacggagggagcagacggactgcatagccatcgcggtgtcgcccacaaaaagccaagcaggactcgaggtcaaaggaagccatatcttttgagatatagatatcataatgactactgatgcactgctatattggagatagtattcggtgacagcgtacaccatatcagtttcgtttaggtttcgttcgattaattcctcttcaaagaaattgagagaatcgatgcatttttttaggattaatcgaataagctcttatatgaaactgtttctcatgggaaaaaaatactctatacttgttaacagaaaaatgaatctattatgctgaaatttttatagagtaatgaaaaaccatttcaattggcagtagagtttcataaataattactagttctaaattcaaatcatcattacagtttgtaaagagtaccgtggtaatatagaaatatttcatatttagagctattcatttgagtagtgttgaaggttcacacactcacaaactcacaataccttcacttggatgtgatcacaaatgtaacatgtggccttgtaggaatgcgggtggtgataatttaggactttttttgaaatttggaattgagaaaacaaagaataggaaaagcataggccgatgatttgatcccatcttttgacatatagttcgagcctatttgactggaatggtttaggctgaaatctccctggtttggttcgtccggtttggtatttggaggtggggaagtagggtgggttggtttggtgagacttcatgagaaagtaaactagggcgattttcagttggatttcatcagcttattaatggactaattagcattaatcttaaaattcgttctgatgatgtgttacaccacccaaacatcaagtccgtgtctgttgcacttatactgggaaacaattataaactcctgaggggacgttccatcgttgtttgctacctgccttcactcgtcaagtaggcccgctaaagaaatatttgtatgtgcaataatgcataatccatatcacggttcacaactgagattaaaaattcgtctacaattggaaacaaagtcatagaatgaaaatgagaaccactttattaagtcgccacaaccatttatatataaaagcatgataatgcaaggtagagaacccccatggtatgtagcacaactacgacatagtagcttgttccaagggcacacggactataggatgcagataaagagcattcttcctacccacagtgatgcccatctcctctgtcatgtctagttcgttcggtgcaactcctttagggagctcccagtcgaagtggtacagaagcattgcaagcatgagctccacggtagcatgtccgaatgtcatgccagggcaaatcctcctacccgcaccaaacggtatatactcgaaatttgcacctttaaagtcgatctttccactgtgaaaccgttccggcttgaacacctcaggctcatcccagtgcctagggtctctgttaatcgcccatacgttaacgaacacggtggtgccttgaggcacatcgtaccccatgaccttgcatgtttgacgacactccctcgggagaagcaatggcaccacgggatgaagcctcagggtctccttgatgacaagctttaggtacgtcaggcttgccaagtcgtcttcacttaccatctgcttcccttgaagggtactccgaagctcgatttgtgctttgtgcatcgcttctgggttcctcattagctctgacaagacccactggaccatgtgtgaagatgtgtcactccccgcaccaaagatgtcctgtgtatatattacggcattatacaaagcgaaaatgacactattatcacccactactatagaacctggcatctgtgatgagtcatctgtgacgggtttgacgttaaagcaaatttaatgtatacataccaggagaacggctttgatgttgccggtggtgagaggcacgtcgaggttgtcttccttctggatcctgaggagcgtgtccaacaggtcctcctccatggcgcaatcatcaagatgcggctgcgcagccatggcgtccctcagctgctggtgctgtcggaaggcgctgtccattagctggtggcccttccggatgctggcctccgcgcggcgcgtcatgccgccgacggcggcggcgagcctcgacgacgggaacaggtcgtccaggctgaaccccgtgaagctcctcaccgcctccgtgatcgactccaggaactcctcccgcctctcgaacctgtccccgatcacggcgcgcatcgtcgcgtccgccacggccgcggcgatcggcgcgctgacgttcacggcgggggcggcgccgccgtcgtggccggtcggcgaggaggacgacgacgaggcgatggacgcgacgaggcgggcggcctcctcctcgcgcacgcggcggaacgaccgcacgcgccgcgcgctgagcatctccacgacgcacaccttgcggagctgccgccacatggcgccgtagggggcgaacaccacgccctcgcggtgggggcgcagccggcgcacggtgggcggccacggccgcgacgcgaagtcgaggtcgtgcgtgcgcgtcacctcgcgcgcggcgtccgcggacgacgcgacgacgacggggacgccgccgagctggaggcgcatgagcggcgcgtcgtcgaggccgcgcgctaggtccgccatggtgcggtggacgagcggtccccggagcatcagctggtggaggttgccgacgaccggcagccgccacgggcccggcgggaggcgcacgacgtcgcggcgcgcggcgcccagcctgacgaggagcacgagagccaagaaggcgcatgcgcagatgaaccagtacgcgacttgctccatggcgaccaagctgcgcgtttagatggatctgtgagtgcaagatagaattgcaaaagcctaggccttgcaagcgtatatgtagaggtgagagtgtgagatgagttgcatttctacgtgccgacgtagtggctgaccttgctgagagataatagatttaaataaaacccggcctctgtatcccttggatataatgctctatcttggagatactattcggtgaacattggtcatcttggagatatcttgataataaatgttaagaaatttctgttttagttacaattaatgttttaaagtttatggagtatatctgagtcttacttaaaaattaatgggccacatcacacctgttgtccacagggaataataagacaatactactaagacaataagttcacttgccatctcttatctttccgtcgagtttaaatcatatctctaaatcataatactccatccgtttctaaatatttgacgccgttgactttttaaacatgtttgaccattcgtcttattaaaaaagttaagtaattattatttttttcctatcatttgatttattgttaaatatatttttatgtatacatatagttttacatatttcataaaattttttgaataagacgaacggtcaaacatgtgtaaaaaggttaacgtcgtcaaatatttaggaacgaagggagcactaattaaattcgacgtaaaaattatgggacagtttgtggacttattccagtcaacaggccacattctcccacatgccttgattagatgggcctaaacccagctaatatacgtggaggcccatccatactaggccataagtcctgggagtacctatacatctttcgaaagatttttataatcgtatcacacagatttttaatctttatattaaaatccgatagatataataaaaagcaaaaagcaattaagaaacaccataatgaacattaaattaccatatcctcaagaaaaagaccaaatccaatacaaaatttaaaatttacatgtgaagattcaaaaattacagtgtaacttacaaaagttacagtgtaagtttcataaattacactgtaacttacaaggaaatgcactgtaaatttgagtgagaaaatcgagtgagagataagaaaaaatctttcgagtgagatatagcaaaatcgtaagtccttgtctattccgggctagggttttcggttcaaaacaacgggccgtatattatatgggccattatttagtcggactaccagcccatctccccctccaagcccagcacggcgcaacgcctccacttggcccgccatctcgccgtcccttctcacgagtcacgacgagcgccgcccccgccgccgccgccgctccactcgttgcctcctccatcctcttcttccccccccccccccccccccccgcgacgagcgtcggcgacggcggcggctggctggctggctgcctcactcctctcatcgaagatcgatttctctcctcctcaacccgctacctcgcctcgcttggatcgaagaaggtacccttctctcattctcctctcggcggctaccgaaccgggcagcccgccctgggtgggattggttcctttatttggcgatgaactactactacccttgctgatccagatttttttttctgtctccagtccatccagtttgctccggatttgattgctgcgtgcgtggagtactgtactgacagcggtttcttcccaagaatttttggggatttttggggattcagcttgagccttcatgctccaacttaggtgctgctcctgatgcgtcttatgagtgtcggatgccgccatggcgctgcgagggcgctgcaaccacttccactctgcagattgtctatctcatcatgtacgcaatctagccgagatgtcagcaatgttaacctcacggtggaggaagaagaggcggcgaggctgatcaagaattcgctctcaaaggcacgcaagtggagtgtacaggacttgattcagtgccttggagccgattgttcgggaatccggcttaccggaaacattgtggacaccttgctgttcaagtttggggatgactggaaatcggcattgggcttctttcagtgggcgcagtcgagggatgattacaggcacacggcttatgcctgcaatcggatggttgacctgcttgggaagatgaggcagattgaccaaatgtgggagctgttgtctgacatgcacggcagagggttggtcacggttgagacggttgcaaagagcatcaggaggctggcgggtgcgagaagatggaaggatgttgttttgctgtttgataaactggaggatatggggttggaaaggaacacagagacgatgaatgttcttcttgatgtgctctgcaaagagagaaagattgaagtggcacgtgaggtttttgcggtgcttagtccgcacattccgcctgatgcatacacgtttaacatttttgtccatgggtggtgcagtatccgtaggatcgatgaggcaatgtggacaattgaagagatgaaaagacgcggatttccaccttcagtcatcacatacaccactgttcttgaagcttattgtaagcagcgcaactttaggagggtctatgaagttcttgattcaatgggttctcagggctgtcatccaaatgttatcacttacaccatgatcatgacatcgttagcaaagtgcgaaaggtttgaagaagccttgagtgtgtctcatagaatgaagtcatctggttgtaagcctgatacactattctacaactccttgatcaaccttcttggtaaatcaggccatttgttcgaggcttcccaagtatttcgagtggaaatgccaatgaatggtgtgtcccataatctggctacctataacaccatgatttcaatcttttgctactacggtcgagatgatgatgctctcaatgtgctgaaagaaatggaagcacaatcttgtaagcctgacattcagtcatatcggccgcttcttagactttttttaagcagaagaggccaagctgataccgtccggcacttgttgagtgaacttaccagcaaacataatctaggtttagatcttgatacatacacccttctgatacatggtctttgtagagtcggtgataccgtgtgggcgtatcaactgtttgatgagatggttagtagtgaaatagcacctaggagtaaaacatgtgtgatgcttttggatgaagcacaaaggacaaacatggagacttatgttgaaagaatcgggaattacatgagttcctttggaatttctgtttaagtttttaatggatttattctcccatgtgattaatttattagtattcagcatattacatatatttttgcatgaaaaaatgatgcttgctatagtgattgggtgaagcatggacaatctgtatcttaccattaatgcataaactaaaagtcaggaagcatcttttgaccataaccataatagtaggttgttaatcagtagaattataggcaaatcaaatgcaaacgtcttcttttactttagtatttgatgcataatgcatttgtaaacatgatacaacgtcgattgaactaactatttttctggtatgttggcatgagtgcatgacagttactattgcctgagattcaaaatgcacgatcgaatatatacttctgtgtgaacaatctttttagattttaagcactaaatgtgtaaacaactaaacttgtatggattaactgcatataaacattgttgttgggtgtgtctagcaaaaaacttccacaatatatagctttgttactcttttgctagtatagtatgatgaaaactatatgtcgatgtatttattgtattggagaccatggagaaaaaaccatccacatggggatggaaagtatgtgattatattttggacgaagtctctcgcctgacaccttagaatactaccatcattttggtaacagagttgcaaggcatgttccattggcttaagaatcacagcaataataaccggttaacatgccatctctcctacataaaatgattgattcgattatctggaatagtggtctttatttactatttattgacatggagcaaatgatgcaaatggatcaagacttggatacgccttagcaagagcctggaagatttccaatcaggcgttcattattgataagtaaacaagttgctttacatcaacctctccctatttctatatgatatcagagaagagccgccaaattaatttttagctagtgtatgtgagtaccactaatggctggaaataaaattgtatttctttcgggagaaagaaactcaccaaactgacaccatgtttagatcccaattttttcttcaaactttcaactttttccatcacatcaaactttcctactcacatacacttcaaacttttctgtcacatcgtttcaatttcaaccaaacttctaattttggcgtgaactgttctatgaaactggtgctggtaatgtcctggtgtttgaattcgtgatgcctactgaatccactgttactttctccaggcaacgaatttctgcaccatctctgaatccatcttttgcatctttgtctacttgggggtactgagatacatccatccaaaagaagacataaccgtgcactcttgtactggtgtagttggagattattgtcatataggagtaggagtattagttttgtttgtccgagcttgtccaattcagaggtcatgtgcatctgaattatggcgcctttcacttgtcctgacctctgggattccgccggaccctctgtctgggtccctgtcgtcttcacgtaaactgaaccacttctactgaggacggcattactctgcctggtcggcatgtctgcccattgtcaaaaaaaaaaaagttactactagcatgtagttttgattgagtatttggtttacttttttaaaatggtttatatctccaatcctcgtcattaggcaggtcttgatactgaaataaaaggcacacgaggttaccacttgctaggtatcttcaatctgtcgttaggcacacatccggagtcctgactgatactgaaattttaaaaaaaaggtacatgaggttataacataaactttggtatcctttcgaatgataagttgataaccggttgaatcaacgctactgcatgttagcccttcatgggttttcagtttggaaattgctatgcattctacccaaatgtacaaccagcatacccctagtgtatgttaaggcacagctattgcttgtctggctcgcatggtaagaagcctgagcacggtgaatggtggatgtggcattgtcagatgtaagctgtatgatccagtcatattatagcacgattctttcagttatttgatggttttcatcaaatattattccaactagtaataagtcctttttttcaaacacagtataaatgcatgcgctcaaaatgcgcgtacactcatccatataaatgcatacaaacacaccctattcctatgagcatatccggaaaactggatcgatatattttaagattgacgaagtaaccacggacatctcgttatcgacggtacgtcacctatcactaaatgaataattagccgtaatgcagactagccttgactgcacgcacgtatgggttcgaagcatcccgtgcaaagggaggtgccgtcggtgcagccgtgcagggggagggcaaaggatcgttgcgaatgtgcaactgccgaccagtggcatgtgtgtgggggcggagtcgccggccgaaacgagcggaacttttttctggttcaacggcagttgattcattcatccctcctccagtccagtgtgttattttgggctaatagctgaatggcagaatgatccgaggtaagtaggaataaattattaaccattatatagcaaggtgagtatagcttaactgattatatttatttggtgaaatcagcccatctaatttaacacgaatgctcgcatttatggttatttatatatattttttggataggtgggatgtgcgtgtgcacccacattgtgagcgtcttagtttgcgctgtatatttttttaaaaaaataaatttcaaatagtgtttgagaaaattcatgtgtagaaagtttacaaaagttcacgcagtttgaagctcgggaaagcgcgtatatttttattccgttccggagaaaatgaacactcccggtcacatgtgtaggctctccgcgaaataaaaagtaacatgtctaggtgatgccgtgcacatgactaaggtagacgatcaacatgcacacacaacacatgggattcggatcaaatgcagtagtagtatggactgcaacttaaacagttgtagctgctacgttggatctaaatccaacggtaagtattaggtcggttactgtagcaaaagtaccaaaccataaaatattgttcagggtactgtagcacgagtactgtagcagttgatctgaactgtttatcacaaaaatgaatggctgaaaatgcatgcagtcctgagaattacgactgcacccgatctcaatcccaacacatgcgggggtccatcgttgtctgcacaagatgctaatctgcggtcaagggaaagctgataaacactgctccgtctctgacaccaaggttagattgatgatactcctacagattgttcgccatcatataatttcagatcaaaggcgttctctgtccacttcgcagcatccaaatcaaccacaaaatttccaacctgacaaagaaggaggttcattacaccactgattccttgccatttcggctaatgacaagtgaacagtgtggaatgtggttgccagcaatgccatgagatcggtgcatgaatcttcttggctttcttctgatcttcataagatcgatcaccggcgatcgattgatctggagcaaattgtttttaaattcgtcaggaacacgcttcaatttgggggcggtttcgctgccacatcaacgtcaaaagtaactgattaggagatgggcaacgcactttgctttaattctgcaacacatgccatagaatcattcatccagtagcttcgcaataactagccagatcatatcaccgactgtgcgcgccgactggttggcacatactaatcctatatcgttctaatatataagaacttatccaaatacgttgtacaattatgttcttgattcttatattttgaaacggaggtaataagtttgtgtgaaattgcaaaatacaagtagttcgaattatgtttgattcgactgcaaatctgtattaagatgacacattgcatcaatgtacaaatctgacgatgacagattattgtcgggcacagagcgtagtactagtaataagaaccatagtttaacaatactcaggcagagctcatattgaattcactaaattcaaaaacatttgatgctgcattgtacggagtactacacagtggcagccattgaatttgaaatcaagtccattattacctcctgtggctatttttaattacacgcatattactcctgtcggccaaaatagccatgattagcactaacccagtactgaaactacaaagaagaaatcgccatcaccatgatcatcatcatgcacatcaactatgtgcaggcctaccatcgctaaaaagcaagccaccaaactgcacaggacagtacaaccctttttgcatcattttgccaacccaaaccctaaaaccaatccaaatcaaaccaaccaccttcctgcgttgatgaccactgctgatcctggtgcaatggctatcactctctctctctctctctgtctgcctggcgtgcgtgtccccctcatcaatgacactgtttcgtttcacctttaattaaagattcctatcctctccaatgattctttgctctttttttttctctcattctgatcatgcaaaaatttccattgaattctctgtctccctgctttcagtgaaaactgaatactgaagaagagagataatgcatccatccatgtgtgtgtgtgctgtgttgtgttaagctttcctttacaaagaggaggaccacggtgctttgtcagtgtcactgcctcactgtttgtggtctcaccttttccctatcacgtcctcaacttacactagtctacatgccacctttatcactgtgcttgaaatccatggctattttagtggcctaatgcaagagtactcttcttgaccctggtggtgagtggtgactggtgagctgagctgagcttgcagttttggttcttggggtcttgaggagttgagctgtggtgcttaacacaggcatagctgcttgcttctttctttcacaaggtattctttgtcttcagatttgcttcattgcttggtcatgttgtatgtcttattatgtgttcctatgttcttggcttttcctgtcaatgtgtactagactactagtgctgttctgctctgcaatatctagtgttcttgctatttgtagaacagaatgtgaaaagaacagcacatttgtttaattttagagtttcagagcagtatgttcttcacctatgaaaaaaaaaactacaatctcctttcttggcagaaaagcagtggcaacaaattggttaattctattcttctgatctccattctgcatatggcctctccccttacagcttgcaaatgctttcatcctactagcagtgcaatagtgcaatccaaccacgagcaataaataattgtgtttttttcttattcttttctattaatgtagtcagctcacatggtgccatcttcttcttccactttggtgcagttgttggcattggctccatgtgatcgatgagctgagagagctcagctcagctcagctcactttcgccactgcagcatcggcgagctagagctgtagatcttgggaagatccagcaatggagaagccggcgtcgtgctgctgctacttcccgctgcggtgggagagcaccggcgaccagtggtggtacgcgtcgccgatcgactgggcggcggcggacggccactacgacatcgtccggcagctgctgcacctcgacccgaacctcctcatcaagctcacctcgctccgccggatccgcaggctcgaggcgctctgggacgacgacgcgcgcttcgccggcgcggcggggcaccgcgcgggcgtcgcccggagcctcctgctggagtgcgagtgcagcaagaacgggggcgccgccgccgccgccgagaacacgctgctccgggcggggtacggcgggtggctgctctactcggcggcgtcggcgggggacatggcgttcgtgcaggagctcatggagagggaccccttgctggtgttcggcgagggcgagtacggcgtcacggacatgttctacgccgccgcgaggggcgggaacgccgaggtgttcaggctgctgctggaccacgccatgtcgccgaggtgctcgacgaattgccccaacggcggggaaggcgcgcgcggcggtggcggtggccgctcctcggtgttccggctggagatgatgagcagggcggtccacgccgccgcgaggggcggcagcgtggagatgctgagggagctcatcgagcgccgctccgacgtgtcggagtatctcgacttccgtggatccaccgtgctgcatgctgctgcagggagagggcagctagaggtgaggcatctacttcttggccattgcttacttcactacttctgcaaaatgcaccatagtgaacttctgtttgtgccaatatgcatggatgacaaggtagatgcccatttcatcaggatgtttgggtgaaaatatttctaaactcgatatctttcaacgttatgaaaccaattttgccttttgatgcgctgcaggttcttacccggtaatcgatttcaacataaatattaaggaacaaattattttcattcgtcctatgtgatgattagtttgagcttggaaggatattgttcagctagaatgctgcgtgtaacccaaggagacattgagatatgtagatagttgtcattaaagaacattttttttatcttatataataagcataccacgcccagatgataaaggctcatttagttaatatcgtcatgctcaactctccagtgtattatgaaccaaagaataattataaagaccatactgatttggcctctttgacatggacttcaagttgtgcaattcatgaccagattttctttaggaattttagttagaagcaacaaaagctccaatcattgatctctctccaataattcgagttgaaaagtggatgtactccttgtcgatccagtttagatgggggtaaaatcacactttttagatatatacggttcctttctgtctcttgatgttgatattcagccaactttctttctgtttcttgatgctgatattcagccaatatttcttgccacaaatcattgtaatgttaggtgtgcaaagctccagttatatgcaaactagaatggaagtttccttctcccagtattatgcccttatgtatgtaaaacatacctcttgcaggttgtcaagtaccttatggccactttcgacattgtcgattcgactgataatcaagggaacacggcattacatgtagcggcctaccgagggcatctgcctgttgtagaggcattggttgctgcatctccatcaaccatttcagctgtcaacagagctggtgatactttccttcattcagcaattgcaggtttcagaaccccaggcttccgacggcttgaccgccaaatggagcttatgagacacctgatacgtggaagaacatcaaatatccaaaagattatcaacctgaagaatgatgcaggcctcacagtccttcacatggctgtggttggttgtgttcatccagacctcgtcgaactcctgatgacaaccccatcgatcgacctcaatgctgaagatgccaatggcatgactccactggcattgctgaaacagcagctgcgctcttcaacatctgacaagctcatcaggcagatagtttccgcaggaggggtgctgaattcgactgttctgcgaactcggtcagcgatcgtttcgcagataaagatgcagggagggattgcaagcagccccggtacaactttcaagatatcagatgcagagatcttcctctactccgggatcggaaccgcggagtcccgacgccctagctcatgctctagcaatggcaagtgtgaccatgcccatcatggagatgcaaaatgcggaaatgctgaaaaccatggatcttcagagaagaggctgagctctgccagccgtgccaaggaccgtctcaagctgatgctgaaatggcctcgtcagaagatgtccagaggacacaagaaatccgacgatggcgacgccatggattccatcaagaagctgagcgagcaggccgtcgagaccccggccccgctcaggcagacattcaccaagacgacggcgctgaacaacaagaggaccctcgcggtgaagacctcgactcccagctcggccaccaagaagaagctcaacagcaagctcatccacggcatcatggaggccatgccgcacctggcgtcctcgtctccggcgtccgccttcccgaggtcctccaccccgccgccgccgcagtccggcaagatgaagggcgtctgcctggaactggacgacgagaactcgatgacgacgccggtgttcggcaagctgaaggacatcgtgctgaacaacgacgacgatgatgacgccatgggcgagccgtcgagctcggggtcgtccgtgaacgacgacgcgtcggcggagatgccggcgcggcggcacgggtgcggcaacgggaggctgatcaacatctgcttcggcgcgcagggcctcaccgtggaggactcggccagcgggcagcagaccagcaagatgttcaagcagcagtgcctcagggtgtcctgactcccgagtgactcacacgcgcacacggtataattagcctgcttttctttggttttctgactcgaattgagcttgcagttcaacggaacatatatggtttctgcatgttgaactcgtcgggcttgtgtggattttgttggctgctgcgtgtaaccgtatccttgcgtggcgtgcttggtttctggttgggcttgtgttaacgccttaacggcttacttcgatgcaaatatatttggtgaatgtatcagctagttgtggtgagttagtcgatcgttttgtttaatttaaacaaacaaacagcagttattcacgtttccggaagaatccctgcacaaaacggaatgaggaaagacaagaaatatcttgtgtattgagaatattgaacatccacaacaaacagtcgacaaacatctgacaggagacaacaaattgcgctaaaagacgcatgaattttctttttttttccctgtaaacaagaaaagcagaagctttttcctatttgcccatatgcccagcaaacaactatcgcttcctccactacatcaaaattcgaatttacagcaggaagcaattggacaaaccgaaaactagagaacgaacgaacgaaaaatctataagccgctgggcaacaccttttgccgctgggagctttagcacctggatcactaattcactatgtgcaaagaaccatttggtcctctcattgcttacccaccttgcggcctggccatggcacttcaaagatggctacatacatacacccgacaacagctcggagtaccgcaagtcgcggccattatggctgtgccgtcctccaagcacatatgatgatttgtagggcaggttaccgcgatactccaggcgcataatttacgacatccagcagcatcaaaattgagggccttgttcgagctagtttggaagcagaaggaaggagcgtctaccatatgcacagctaattcagcaactagcccacaagcactgggactagttgatctctccttcctctgcatctttagtgctggggacactgctaggatcttcttcctcttcctcctcatctgctttcatgaagagtcccagctgttccaatggattgcctgatccaggaagaaaactgggcatgccatcctgggaatgctcaggactagtctcatcaacagaactcacaatatgttctgtggttgccgttccaagcatttccaaatcctttagatggaggttgtcattgatttccaccgttctctccatctgcattaagttaaaccactcaaattttagcgggaaaaagaaagctcgacaccagtaaatgcagtttttttcactagcctcctgcagggcctggcgagctttctccctctcaaggtcccgtttacgcttggcttcagcttcagcttcagctcttcgagcttccatagctgcatttccttcagccaacagccttgctttctctgaatacatagataaggcacttctcagggaaaatgtaagaaccatcatttaagagtaaacttcaggtggatatgcctgttaccttccttctggagcttttccagctcctcctgtttgtctccaccctgagctcaccaaatgttcgttccatgtcagaagcagcgcaacaaaagtgaacaaacaaaaccactcgatgaaactaatcacaaacctggctgagaatcccctgtgccttaacaatcacatcagcataacgactcctaaggagggctgctcttaagagcttgtctggggagacttgcctgtcgggttttgaattctcccctaaagtttcatagggaaaggatcagatgatccaatcagcttaatgcactgagaccccttaatggcctcatatgtactgcttgcaaattcatgcttaccctctggggcaggctttgactcgttatcctgctcacggagctccacatcatcagcaggacctgtgattttgaaagttgtaagagcattaagccaaaagctcatccaactgccacatgaaactacaaacttgtgctgctgtgacgattaaggtgcattttgatttctaaaggtaatttttttgtagattttaacccaaaacttggtcaaactacaattacatttagtgcataaaacataccaatagatttatatttcaaagagttctcacactgatattatgcaggtgcttattgttgaatactttttcaaatcaaaataagccttaagaagacgtggggaggtagtagaacagaaagggcacaggaatcttacggatggcatcgactggacttataacatcactcttttcttgctccaccagttgttcagatctcttacttccctaaattatatagatgacaactatttcagtgcaataacacggaagaaaaggaaaagttgtttcgatgagaagaaaaaagcaaccttgacaaaatgattaagagggatagatatcacattcaaaattgagcctaaatttctcaaagtaccacagtaatagattatttaaacgaacatgtctgtttctgaccaaattagacaataagggtatattaaattaatatgagagtcagcttatacagtatgcaggggctgatgtctgattatagatgcatagcaatcaaccggccagaacaaaatattcacaatttttcatcaagcacccaatgacaaatagccaaaataccttcggctttcctgggctaccacctttttcttgttcgctttcactgtcactgcccgactcagaatctgcattattggagtaaatgtgattgaggacacctcaagacaaactcatgataaaggaaggcttatgacaagtgggactagcagaagtccaaacaggaacaattacgcaaacatttagccacacaaacaagatatgatgcatgtattgctattctgaagataagataagattgttgcaaattagcacaagggtaaattgcaggatggtatcctgcttgttcgtcagttaacgatatgaataacagtaaccccagttaaagtttctataatactgataatctagtcccccagaagatcaaagaaagagggaatattgttgaatgcatgagcatgcatactgactagtgggcatctaatggtacagatgcacctacagtgaagtataattgtgcgtacttcttgttcagtgcctcgttagctaaactcaactaaacatctactcaaaagtaattagcttcaagcttaaacgtcacagaagttaatataatgaaatacacaagtgtttgaagtaaccagatcattcttgcaaaaacatatttgtttacaaggacatatatcatactaaagagagtatgtaagcacagaggagcacagaccgctggaagaagatccagagtcactgctggaactacttgggctaccacacttgttaggattgttgtgtgcatctttttctatcaatataggggatgcattcccgcaaatatctacatcctcctcaactggatcaccacctgcagagaaaaagaagttgtaagagtactgtgatgttgcataaaactaagcattagcaaaggaccagggaaaaaaacctttgcagggatttgtagaggagtggctaaggccagatacattagcagcctcattctcagaaggctcagattttgcctgctggctctgctctctctcttgcaaatacttgtcaacatgtttcttcaactcgaatagtaggtcatcactgacagcatggatatcaatctctatctctccatcaccaagctgatctgtgttgttgtcaatgcattgctgcaacaaatcaatgatgtgtgaaggtacctccggatcctcagacaaagatgccaaacagttcccaaatgattctttctcctcgaatgtcatttttggctttacagactctgttggtctaacagactctgttggcctcacacactctgttgacacctcactgcagtccacagggggagtcttcctcctctttgagtcagccctgtcaacctcgacgtgcgcctctgtggcaatggaagccagcttcttttcaattgtcctccatcttgattcaaacatcttgtttagttgaatggcataatcatgcactacatgcccacgaggattgtaagtcatcgcatttgaaaaggtcagccgtacatcggctgcaaattcagatggactcgtgtaggaaccagagtcaagcttattcctgatagttccaagatccatcggtttcttgatgatttgaaaataatctggaatattcagcttaacagcatcaaccggggagtcgaatatgttactacatttctgagtcatcagctttttcagaatagcatcgcattgcttaaaaatcgcatcctcagtcaacaccgtggaagcctcaggtcggggctttgtaggcaagaaacgccccttggcaccacggaccacatggttaccacgctgtcccttcttacctcgaggggcagccgaggacgagagcgcgggagctctattgacagggacagggacagcaaactccggcttcttgaggagattccggaccgaatcaagctctgtgcggaacctcttccggagatgcctcctctcggaggaggacatcttggctgggacgaaaatctcccgcttgacatcgaagccgtcgctgtttaggctgatgcacttgcgcttgggggccgaagagtcctcggagtcaacacgaacggggctgcctgccgcgccctccgactcgccaacggtctccgcgtaaccccgtggcgccgctgacgccatgccccggaacgccatttcatcgtagccccgcttaatctgcctctgctgcccaaactccatgaggaccgtcggtgtcatgtgcccgggcgccagatctgttcaccattgacaaccataagagacccaagattcagtcacgcggaagggaaacttgaacttagcggaatcaaatgccaaatttgaacttcccgtacagcttgatgtaagagaacaacagaaacacaaaacgtattcaaaaagttccctccaaaaaccctaatcccacacctagacctaattcgaattcgaaccccaccccccgccacgcacgaatccgacaccgcgacccccgaatcctccaattcgcgcccagaacctaacggcacgcgaaaccgaagaaaccccaagagaaaaacatccccgaaaattcgaaacggagacggggggtcgcgagaacctgaagaagccggatctgaagagggcgaaaccctaggccggggatccgcggcggacggcggcctcctcctcccgtgcggccgccggcgagccggatctgctccggagacgggcggatctgagggtcgcgaggtggccgccggctcgagacgcctccccgccttatcctcttttttttttctcttttttcttctcttttctttttcctcctctcgagtcgagccgtctcctgcttatccttttccttcgcgaagcgactcgacttgagccgagccgaggtggagggagccgagccgagccggggagagccgaagtggagatccgcgcgggggaagcgagagacccgaaactgggaagcgaagcgatgcgagactgtgacgcgcgaggggcggacgccctcgcgggcggtatttataggcgggggtgaggccgcgggtcggatccgggccgtcggcttcgcggggatcggacggaccaggggttagatctgggcgtgggccccacccgggccgacgtgacgtggagcggggcgcgctttgactttcttcgagaaggtccgcgcgcggacgcggattcctacccgaactgaggatgacgtgtggggcctactatagctcgggaccacctgtcagtgaccttgaggggtcgtgttggggtgggtggtgcggagatcggccgtcttttatcgagcacgcgggatctgggtacggtttgggcgcgccggggagcgaggtgacttggaggagaaggcttggtgccacgtggaaggaggtgcgtggctgggttattggagggaaggatgtaacgggtacgggttaggtaccgaaagagaaaaaacggaaggttagtcgttcgctccattttccatgcgattttcctttttaataaaagggccatattcggcccaagaaaataagggcctaaattgtaggccttttgtataagaataagtccaccttgactcccttaaaagtgaccgaatctaatccgtgtccctgaaccgcaaaaccagatatcatggccccctcaactgttaaaaccggtgcaacttacctcccttagcagttttggagaatggctttactgatgtggtgtctttgactcgatccaactagctaactcagcttgtgggacctacacgttagtgtcacaattttatctctctcctttctttctttattcctctctttttcccacgctgtctaacagcaaccgaggcggatgcggattggcaacgatagcgccgtcgcggccacacctcacggcgcggggtacggtggccacctcgctgacaccgccgcgggtggcgcttctttctcccgctccgcatggtcggcctcgacctccgcgacagccacctcgcggacacggccatttgctcggcgactggacgtctcgcggcggcggtggcatcgccctcgcctctattttcccccaagcgtgcgtgcgtgtacaccacgtccacggcgcacgtctgcgtcaagaacgtcgcgccagccggggcacccacgtcaacagatgggttcgcttctccgccgcgtcgagagggttcagctgaagaaaaaaacatcctccccctgcacgttttcagtgacccagataactcctctgctcatattgagtttcttcatctgggttatgtctgcctgaacacagttgctaccactggtttgttggctttgccaacactcatcttaagttcattaatcaattgttgaattttacgtgtcgtacaccaccaccgtcgccggcctcccttgctccgcctcttcccagaccagctcatccagtgccaccgacccgacctcctccaaccgctcgaagtatgggccacggtggccgcccaagctccgttgggccgctctcgtcacagccgtcggagaacaccgcgacgtgcaccaacgacgaaccaaggcagggcttggtcgagccaacgacgaaccgcgtcacggcgacggtgcaccggacgccgccatgaccgcgaagacgagcagcaacggcggcggcgctggtgggaggggaggccgacatagcgtcgcctcgaggccgcgagcgctgacggctccctctcgcacgccgccgccactccgcctccgtcgccgaagagggagagagagagggagaaggaagaagggatagacctacatgccgcacgcaccgacggctccctcgagctctggctcctctcccacggcgccgccggcgcctacgccctcccgcccaccgctgccactccacctccgccgccaccgctggccctcgctcgccgaagaggagaggggtaagggacagagggagagggaggaggaagaaaggatagacccagtgggccccacatttttttcccgaatgacgaagaggtcccacatgtacgtttttagttctaatgctacataagcaccacgtcaacggcacaccaggtcaacactgccacatagacgccacgtcactaaaaccactctcagaaaccgctgagggagtcaagttgcactggttttaatagttgagggagtcaagatatctggttttgtggttcagggttatagattagattcgggtcactattaaggaagttaaagtggacttattccttttgtataggacgtaagtatggttgctaaggccctaaaaagcgactcttttgtggtcgtagcagcccagtatagtttaatttgagacctatgtgttctacttctaagagcaccaataagagatttgctaaattctatcccaaaattctgaatttggaatcctaaacggaatgatgtaggaagaaaattctctccaagagattaagtaaaattaattccctaaaaccaaaagtgggccccatgccaaactactaacacgagacagtttatttaccttcctcacgcgtgattgtgagttccggatcacggttgtgcgctcacggtaataagatcatgtgtctcgatgtatgtcgccgttgttcgctcgttcccaaccctcgctgcccaccatccgttccctccctaaccctagcatgtcattgtctcctccctcccaattctagttgttgctcatttctcacgactttagtgtacgtcgccatgacactacgagccacaatcgcctggtgtgggcgccaagaactgaggggatcatttttgtgtgggcatgggaacaagatgacactggtgggagttagagattgggaagtgtgcgcgtgaaaaatgatggagcaaaatctaggagagagaaaaaaacacaccctaagtgtcagggttacagataaggcatacttcatatcctacgacttatgtagtacacggatatggtatactttcacgtatacgaatcgttcctatatacgctgttggaatctgttataaattatgggaattatctccacgagacaggtgatttccaaagtcctactcggaagggatcgagtttctgttataccgtgcaagatccgatgtctccgagtcttacttgggataaaaatgacccacgatataaaagggaccccaaggaggggtgcaaggcatcatatctcatcgccaacacacccactgtagtttacgaagtcagagtacgcgaagccaagtcgccgggagatcttgtcgaatacatcgactacgatctttctacttttgttgtaatacgtggttttccatcatcaatctcatataaaaactggactagggctattaacctgacaaggggcctgaaccagtataatccttatcttttgtttgcttgatgtcgtattgcgtagatcatcgttccaatgtaccctagtacccaaatcatctggtctacaagtatcactcgtcgatactaaggtgtcttatgatgggtgagtatcttttacaaaatggtactatcattacaatcactgacacgtaggttccacttttctattgtcatccacgtcaatggctttgtttggatcctccaggctattaaatagccctccggaatcttactatttatgagtattaaacgtagattactaacaaaacccattccataacccctgaactattttgcgagacgaatctaacgaggtatattaatccatgatcaaactattttgtgagacgaatctaacgagatatattaatccatgatttattttgcgagacgaatctaacgaggtatattaaatattaatatacctcgttaaattcgtctcacaaaatagaccaggggttatgacgctataccctccgttacaaaataagactttctaacaatcaaaatttatttatctgagagtatacctatttcttcacttactcatcttaaacaattgcaatgaatgctcatttcatttctccaactaatcacattcatctcattcatctcttgtttagtttcacgtataccaaccccgtgaaaggctttacgagtacttatactttgagagaaagaggatgctaatttccaagataaaaataataacaagatgataatgtcaatgtgtcggttagcttatgcttaccgaacgatgccaggtatacacacagtaatgcccagatttttctcaccagcacacatcagatctagtgacataccaaacgaacagtaaaaaagacatcaataaactgctgcatacagcagcggtttccactcagcgtgtacttgcgcactagcgcgctcattgggcctcacaagtactacatggaaacacgcggcgtgcgtgcgtccatgagtccatccacgcgcgacgagctgtgtttgtgcttgtgcccaaacattcgagcacagagcagccaatcccttcccttcgcatgcgtgcccaaaaaagttgcacttgtcacgtggggcgatggggtgtcgcgcgcctcgccgccttggattctagccacgcagcgggggaacaaaaccacatgctgggcttagcttagctcccatatgcgcacagcagcacagctcgtgctaaccgacgacggcacacagtagcctcacatgagtcgctcgcggcccaaaagcacacccccaacacaaccacacgcactacctacctgcacccgttcgtgcacgagaaacaggggcaggaaggatggccgttagatctctacttccagcggccaagaatctcctgtgacgccgcaaagaaaacgaatgaaacaaccgaaagtaacttgttcttaacgatttaaaaactaatattaaaaaaaataaaccacgctaaaaaattattgaaataaactttaatatgaagttcaaattttgaatttcaattatggctgataagctactagaggctggagcgatgtagaatgcgaactggatgggagggtgaaaatgatgagcggggattgcgatttttttacttactttttttaacttaaaatcaataatatgtggaaccgctattcagaaaggtcatatgttagtgatcacgttaaaagaaaaagtaaataatacttcctccgtttcacaatgtaagtcattctagcatttctctcacatttatattgatgttaatgaatctggatagatatatatgtctatattcattaacatcaatataaatgtggaaaatgctaaaatgatttacattgtgaaacggaaggagtagaatcctgttgcgatgagcggtgcatcgtcgtggggagaacgtgtggctcgttgatgatcggcggtgccatgttttcagggaccgagcggcaacttttgtgctgatagcgtgcgtcctgccgggcgggcgtgcgtcgttatgtgagggcaaggccgcttatatgctgccgcaattaatcggaagaagctgaccggtgccggccctgaggacgtccacggtgcagacgtgcacacacagtacagtctccgcttgttacagtgaccgccaatcatgagctcaacactctctattcccttcctgattgctgacagctgcagctgacttccttccagctatagcagcagcagtagctgccgtcacttcgccaccacagtgttctcatctccctttcatatcccctgcttcctctccgtccatggaggaggtggcagtagcagctggcatcctcctcctctgatctcctcctcggtcacttcagtgcttacttgccggtgatgaggaggtcttctcaggggaagagctccagcggcggcggcgttggcggcgtacggaggtatgacgtgcacggtggtggtaacttgctggcctgctacgcgaaggcggcgaggccgaggccgtccaagtgggacgacgcgcagaagtggctctcccgggcgggcgacgacgactgcggcggcgaagctacccggcggaggagctcctgcgccagcgccgacgacgggctgctgctgcctcctccgccggcggcgcggaagggggccggcggctggcgatcgtggagcaacgtggaatgggagggcgcgcccgcggcgatggcgccggcgctgaaggccgcgcgcggcgacgagggggtggacaccaaggtggtggacgccgtgcaggcgtacgtgccgcagcggtgcgtggtgtcgctgagggacgtcggcacggagatgacgcccggcgggagcaaggagccgtcgagggcgaacactccccgcgtcgtcgcgccggcggcgaccgcccgtgtcgtcgcgcggggcacggcttcgcctgggcaatgcgacggcgggtcgcgtgacagcgccgtcgccggcggcgtggtggatctccgggcggctcgcaagcgcgccgatcaggggcacgacgaagtcgcgggcacgatcacggccgtgtcgcccgcgacggcgtggggcgacgcggagcgcgccaagtacatggccaggtgaccgatcgcgttccctgctgctcatcaattttctttcatcttatcgatattaacatcaatataaatataagaaatactagaataacttatattgggaaagggggaagcagttctttgcttgttatccgtctaaaaccagcaaattcgactaaaaatttagttgctcatctcctctctaaatccatggttaaaatcggtttgaactacgaaatcctgctgcaaaaatgcgctaaagctgtgctctgcatgtgcagtcaacagtgcgcagcattttctttcgttagcattttcttttgtcggacagcaccacatcagtgctgaactgtcagctagaagcactgagacaatgacatcctctgaaagcctgaaaccaaaagcaagcagctaccaccactatacttgtctactcacgtttgcatcgtgtgccattgccattttcgctttgtcaggtacaggcgcgaggagatgagaatccaggcgtgggagaaccgggagcggcggaaggcggagctgcagatgcggacggcggaggagaaggccgagcggatgaggctgcgcgcgcaggcgaggacggcggggaagctggcgacggcgcaggcggaggccaaggcgcggcgcgcgcgcgccgaggccgagctggcgctgggccgcccgggaggcggtgccaagggttggctgctcacgcggagcgcgagctggagcagcggcagcggccgctcgccctcctctctctcgctccggttgccgctgctgtgccgctgagaaaaatccactgccacagtcaaaaggctcgtgatcgatctgagagtttccgctgcttgttgaaggcggtttctgatgtactactagtaccaggcacagaagaattttatctttgtaccatcaatgaagacccgtttagtttcccaaaagtttttcctaaaaacatcacatcaaatttttagacacatacatggagcattaaatatagattaaaagaaaaactaattgcacagttatggaggaaatcacgagacgaattttttgagtctaattaatccataattagccataagtgctacagtaacccacatatgctaatgacggattaattaggcttaaaagattcgtgtcgcggtttctagacgagttatgaaattagttttttcattcgtgtccgaaaatcccttccaacatccgattaaacatccgatatgacacctaaaaatttttatttcacgaactaaacagtcccgaaatataatcttgttacacgaataaatcagattgttttattgtactattcggcatcaatcacggcatgttatggtccgtgccatttttcaattcaagcatgtggtatgtagttggactctttgaccaacctgtcaggtcggccactaccagtccatttccactctcggcgtcggggccccacctgtcatggacccgaatccccccgcgccgcgtacgcgaaggtcggtgggaaaccggcagagcaaaccgcacgataagaacgcggccgacgtggaccacgtggtgcgcggacgctctgcgtgcccgacttggctttctcctcctctctcctcccgcaacccgcgcacgattcggttccccctctcctcgcggccgcctcttcccccctcgaatcccgataagcagaggcggaattctccaccgcggcagcaacatgcaacccccagttcgattcggctgcgaggtgaggtcgtccgattcccaattcggtcggaatcacgcccaattttttgtctctactagggtttggtttcggtctgaggatttctagtttggtggagaatcgaggtccgatcccccaaccgggtcggaatcacgcccaatttttgtctctatagggtttggtttcggtccgaggatttctagtttggtggagaattacctctgggattttgcggattcgacgtcggttgctagggtttgtgaggggagcgattcatggctgcggggagccacggggggtacaggggctacgaggtggcgagggagcgggagcacgacgtgggggtctctaggaggagcaaggagcactaccaccaccgccacccgagccgccaccgcgactcggaacgccgccgtgacggcgggcgcagcggtggccgggagctgtcgaatgggtacagccaccgccgggattcgccgcgtccaccaccgaggaggcgtccatcggaagggaggacggaggacagggagcccggcgaggtctcaggtgggagtggctcagagaggtccggtgagcgcccaatgaagaccggggagccgagggagaatggtgtcacgcgagtcagcaaggaggaggcgaagatgtccccgagtaagaagaggaagcaatctccagtaatttgggacaggaatggttcaaagcggcaggctcgagaccctgtgaggggcattagagaggtagatgctgtagttgctgagattattatgcatcagtcgcattccttgcctgtcatgagctcactgtctagcataggcgatggacactcgccaatgattttggatgtgtcagttgataaggtacaggagtatgagaagaacaggattgtggatgaggaggaagagggatacccaacaatgagaaacattctgacctcaagatgggcagatgctggcgacgaggaggaaaatgtgtttgtgcccaagaaaaagaagagcgtgtcacctgtcgactcgattgaacgagggtccacaaaaaaggttacaagccctgagtctggagaggtgctggtgtataactcagtgagaagctcctcaaggtcatctgactcgggggtattacagggtagtgcaaaccgggaccttgaagtggagaagggtgacaacatagatgttgaggaggcggctgatgatgattatcctgctggtcatttgctggattctgattttgaaggtgaggactgtaggtctgaaacccctgagtgtacacggtccccacgtaggtgcattaacatgcttcaaggttgtaggagcgttgatgagtttgaaagactcaacacaatcaatgagggtacatatggagttgtatttagggtgagggataagagaactggtgagattgttgcgctgaagaaggtcaagatggagaaggaaagggaaggtttcccactgacttctcttagggaaatgaatatcttgttatccttccaccacccttcgattgtggaagtcaaggaagtagttgttggtagtaatgacagagatattttcatggtgatggagtacatggaacatgatcttaagggtgttatggagacaatgaaacaaccgtatagtcaaagtgaggtcaaatgcttgatgcttcagctattagaaggtgtgaagtatcttcatgacaattgggtacttcataggtaatgattgttaatcactaatttttcttctcctttacacattttctggaattggttttgatgttagattctaataattatgctgttccatagggatctcaagacatctaatcttctcttgaacaaccgcggtgagttgaaaatatgtgattttggactctctcgtcaatatggcagcccgttaaagccttacacccagttggttgtgactttgtggtacaggtaagtcattagacagtctatagtttcatacaatcagtctaactcaaaatttaacttatccatggtcttattacatgctccttatgactgcagggctccagaattacttttaggtgcaaaggattattctactgctattgatatgtggtcattgggttgcattatgggagaactcttatcaaaagggccactgttcaatgggaaaagcgagatagatcaacttgataaggtatatggttttgacttttgtctattccatatctttattttgattaaggaaatcttatgatgaagtgatttccattgcagatatttagaacacttggcacgcctgatgagaatatatggcctggttattctaagttgcctggtgccaccgtcaaatttggcaaacaaacgtaagtgccaactcatttcttgtttctgctggtttatttatttggatcatgcagtttctgtatcatataaagtcttaccactcattcctccctcaggcacaatagattaagggacaagttccgagctgtatcattcactggtgggccgatgttgtcagaagctggatttgatctgctaaatagattactgacatatgaccctgagaaggtaatacacttaatagagtgatccatctgattcttgtatcttcattttgtagctgactgaacatggttttttcatacagcgtatatcagcagaagatgccttgaatcatgaatggtttcgcgaactacctctgcctagatcaaaggatttcatgccaacatttcctgctctaaatgagcaagacaggtacgagtgattttgctttttacttctaatttatcatcctaattctgaaattggcgttttatgtggtttgtaatgttgtatttgcaaaacatgcaggcgcttcaagaaacatatgaagagccctgatcctctggaagaacaacggatgaaagaacaagggaacaatggagatcgtggcctttttggctaatcttgaaccatcactataggtctgctgtggatgctaattttcagcgtggaatcaatggaagtacatgtcttccaaggtgagatatccactggaatgaagtatctgtcttcttggtgcctgcgacaactgatggcgttctttagcaggcatatgaagggggataacatgtctccttatggtccatgctagctattatatcattgcagggttactgggttagctctttctcagacttctggtcacaatctaattcacctgcattataaggtgtgcagatctaacccacctgcatgatctggcctattaacttctatctggtgcaccagttttgcttctgaaatttctgactgtaaagtaccttagtttggtactttgtaaacaatgatcaacaggacctttttttttctgtgcaatgagcacattttcttttgatcttcgcattttgtttgcaagagatggatggagcaaaagagggagggtgcattatgctttttgacgaggaaactggtacatagtaatgcaaaatgtaaggtaatatgctgaggcttattgtgtccactgatgtggtgtataaaaatgaaatgtatctttaatcttttttactgtactttgcaagatcacttcagttgctccctgaagctgcttgaaaactagctaatttatgtaactggtcattataaaaatgatcctccactttctggaaggaaacaatacctgtcagatttttcaatatcacttgcgtgctacaatgatgtattactgactctatctacttctaatcttgtgtaatagaagaaccaatcaatttaatatcatttgcttgctacaatgatttatcagacaataactgactcttgtctacttctaatcttgtacagtataatagaagaaatcaataatctaaggacgtacgattgtattaatttatctttggaccatttgtcttgcatcatttttttgtaacaagtgacagccaggaagagttctttgtttttatttatttatttatattttcttctaatgatctacctttttaatgataggccgctagacttttatcaaccaaatcattattcatgataatggtgaaagatgtgaaatgtttttaactctgaggtgctggcttttccctcatgaaaaggcaatactcactgatctttgattcattttgctatcctgttgccgtatgttcagttcaaatcatttgcttgtgctttacagatgattatagtgaaatcagtgattcttatgatgtccattcttgcacttatcataataaatctacatgtcatattgacttatcactaaagttcttgccagaccagttaatgatgttcctttatgctagtttgaacttgctggagagttgattgggttcactgtaaacaactaagtgttctgtgacacatctgcagcttaagctgtggctataccgagacaggaagcttgatggacgtatctaattgacttatttgtggaaggcttcgagtcttcatctgtgatctgttactgttgtgaattctagtggtcagtctgctatcttatttctcaatatattggtgatcagtatgcttcttgctagtagcttcttttgtagctgtacacctgtttttttttttcaatgacagatatattcttgacatgttatattttcagtcctgcccatccacatatgtgggacatgattttagtacgagttaccagcctagatgtgtggatgaatcaggattttgggcaatccataatttcttgtatctccttgtgtccatgcctgcaagtacagctgtgtgttatcctgcagaacctttcgttcttttgttattctttttcaagtagaatcatgttgaagaattgcttgcatttgataaaataatattgagtctggattctgcaactggaaactcattgtagactggtagaaacaaggaaaactgtgcttttgtaattcatttccacaaatcatttactcttactcctacctttttcctttatgttttagtaagatgcagactgaccaagaacaacgttgaggcgcaggacttgtcatggttgtccagtattttcgaaggttgattctatcaattccgcctgccttttatatatatttacaattacccacattccttgccagttgacaccatgatcctactttttatcttctgctttacaatctttcagtgctgctttgctaattttctactgtgctactatcaaattgcatgctttactggcactattttcactaattatttctcttgcgcacctgtgaaaagtttgatgcccctgtggctaataacttttttagtgtcatgggttacttgttttaaacttataagtaaatattctattgagtgaaaggcttgaaaattttgtcaccaagatgcgaacgaccattaaatactcagcacagttaaggcttggaaaataaggttacatgtttagcatgacagtgcgtgaagtagagaaaaaagcgctgtcagcaattatgctttcctgaagcaaatcgatgtttctggtattcgaacttttagggcatacaaaacagtctttatagcaggctcttgggggtaccacctaagctcagttaatatcaactctctgtagactcttagcgccagataatagggaatttcctcgcatgaggctagataaaggaaagaagaataatgataaaaatattttggtggattcatggttagagcctctgttgtctcaattgttataagaggatagtctctaagatgatgtgtattaccaaggaacccatactaggctcaactgttgtacttgccatactacctccgttgtaaataagtgcatttctggtttcctaagtcaaactatcctaattttaaccaaattcatagaaaaaacaatactccaataattactattcaaatgagcatcattagttccattgtgaaatatattcatagttttacttatttgacatggtagacattattactcttatctataaacttatgcatttgatttagtagaaaactacaaacgcacttattttaggatggaggtagtagtagtttgtctaaatgagaaacgtatccatgacagtcacactcacacactttactccatttccttaatacaaagaacaatcttaccaaccatgcttggttctaccagtatcaacactctattcttcttgtcgtgtcatggatctgcactgcatcttttctaatgtctttgcatttacttgttttaactgtccctttgtttgtgtcccctgcaaacctcgtgcaaagcgacaatgggccatactccgagttgcagaggcaacaagttctctacgtctcctatcgtatgtctgaccattttgtaggagcggagttcagggacctttgtcaaggcaggcggccggatttcttgtttccggtgctgcaatatgctcaggcgcgttccttttttcttttttttttggagaacttagccactaggtaaaggttgtaaaatgccgtagcatctgttctctgtaaatacgactgggtgaatacagtgaattggtatgtttcactttcgtcgatttgttggtttgaaccgtgtctgaagttcacaaatctgtacactatcatgctgcatcagtcgaatctctgggaaacggaatggtcatcagacgtcttttgagaatttgagatctccgagcactatgtataagatgtattagaacgtgtctttttttctgaacacgtacttgaattccaatcactatactttgtcatttcacaaacaaatatactagattgaaattgacgagaaacgcatccccagtttccctacggagaagtaccatccaaacaaccatgcgtatcgaggtctgaagatgcaaaacctgtggctttcagtttctactttcagtttccacagtccagtgctctctgcttaggtggccactggaggaggaggtattgcagcagagcaggtagcaactggtgggccccacaccctgagtgtcctcctccagaactatagacaaccaaatgggccggaggcacgtgggccggcccgggcacggcggtactgtggccggcccaggcacggcacggcccgttagccgtcgtgccgagctggcacggcccgacgtggccggccgtgcctgggccgacgcctcggcccggcgtgccggcacggcccggcacgactactgtagcgggccggcacggcacggcccggcgcggcacggcccgcaactgtagcatgccgttcgaattttgaacgcgcggcgcgcgcgcggggagggggggccgggcgggcgggctgctggcacgtggcgcgcgcgggcgcggggggaggggggccggccgggctgccgggcacgtggcgcgcgcgggcgcggggggagggggggccggccgggctgccgggcacgtggctcgcccgggcgcatcggtggggggggggggggcgcccacgtggcgcgcgttggatggtggtggggttgaaattttgcaacggttaccccgcaacggctacttcaacggctaaaatttgaaaataaccgttggaggtcgaaaaaaattcaaaaatatatgaaaaaaaactcaaaaattaggaaattttttcctataaatagggtagccaacccaaacattctggctcatccaaacattcaatcttgtgctctcttgtggtattttgtgtgttgtaggttacgactttacggtcttccgaatttttggcaaaatttctctaaatattgccaaaaataaaaataactaggggaagacatatattcctatttgtaagctgcaaacaaagagttgaagaaggtaagaaattattattattattattattagtgttattatttacgtatatgttaattttgaaatttcagcatggacgatccgaattacccaatatttgacatgagcgagtacgacccaaatttcggcatggagcaaggtggcagcatccctgcaccgatgccggaagaacctgcaaccacacaggtggcttcagaaggatcaggaactgtggccgcgagtgggtcaacggcctcgtcctctaaaagatcgagaacttccaccgtatggcaaaattttgatgagatcaaggagaccggccctgatggtaaagaggtaacgttggctagatgtaaaatatgcagaactaaattatctggaaaatcttcaagtggaacaggacatttaagtcggcatgcggcgtcgtgtgctaagaagcaaggcatccaactgcgacaacaacaactgatattgaatcctgatggtacggtacgttcgtgggagtacgatcctcaggttgcacgagaatctcttactcgattaattgctagacaagatttacccctaaattttggtgagtcaactgcatttgaaaaatatattcaaactgctcataaccctaggtttaaatctgttagttctcaaaccacgacccgtgatttaagaaagttctataaacaaggtcgtgatacactgaaagaattatttaacacttgcacattttctgttagtatcacatctgatatttggagtggtaaggccaaggaagactacataagtgtagttgctcactttgttgatgataattgggaaattcagaaaagaatcattgctttaaaattaatagatgttgcacatactgctgataatatcgcggaaagaatttccatggttgttcaagagtttgaccttacaaataaaattttcgctataacactagataatgcagctgctaactctagggccatggaaattctacaacctgtattctctgtctatggtcaatcatttcttttacatcaacgttgtgcatgtcatatcattaatctgatagttaaaactggttttaagagggtatctacacatattgattctgtgcgtgaggcaatctcatggttatttgcctcaaacccacgggttgcaaaatggaaaagattttgcgatgcatcgggtatgaagccccgtaagttccgcacggatacagatcatcgatggaataccacgtacctaatgttgaggcatgtgttgccttataaggatttactaaccgtttttttgcagtctaataatgctacgaacagtgatgggcaactaataatgtccgagccaacttggtatgtagtagaaaagtttgctgcatttcttgagatatttcacgatgccactgttgctttatctggagtttattatccaactgctaatttaatgttgcacaaaatccttgaaattgctactttattacaagaaaatgagaatgaccacctactatctgctgcagtctttcatatgaaacaaaaatatcttaaatattggaaggaaatccctgtactgtatgcttttgcatttattcttgatcctaggggtaaattacggggattggttaatatgttgaatattattggagagataatgaacatagattatactaactattattctgatgttaagactaaattatatgagacatttgccaagtatgagaataagtttcagggacttcgcctacaaagacccccaactgtctctgtcgctggtaagaagaaaatacaatggggacggatttggggtggtagttcctcttccactcctgctgggagttccgcttcaggaacaactggtacttttcaaggcacccaagaattgtcctcctacttagacagtgactgtaccagcactgaagatctcaacgtccttggatggtggaatgatcacaagacccaatatcccgtgctctcaaaactagcacgggatgtgttcacggtgcccgtttctaccgtatcctctgaatcggccttcagtacatgcggaagaattattgaggaccgacgaagaaatctaagcagcgatatggtggaaatgctgctcatcgtcaaagactgggagctagctgctgaacgtgctcaacactccgcagagaacttggaattggttgctcagttcgaagatctctacatcgatacagatgcacaagattagctagttttttctaataattttcgacttataggctgtactcttttttctttgtcatggttttctcaaatatgagtttttacatgacaaagtttttaacgaggcagccatgtaatatcaaaattaataaatatcattattccatttttctcatattctttatatttatttagctttttcctattttttataatcatcttttttatatttatgtacctaatttcctatttttttctaaattataatcatattttttattttcccttttttccttttttttaattttccccctattttcccttttttttaattttttccctattttcctcactgttttttcatttttttattttttccctatttttccctcttttcctccttttttccccttttttttctctattttccggattcccgggctgcggccggcccacgtgcccccgccggcccgcgtgctgattcgtgcccgtgccggcccggcacggcacggcagcgtggtgggccgtgcctgggccgcgcacgcggcacgcgggccggcacggcacggcccgctacaggacacgtgccgtaacgggccgtgccgtaacgggccgtgccgattcgtgccgtgggccgtgccagcccggccggcccacctggctgtctatatccagaacagtcatcactattcactcctctcctttcccattctgtttctcttctgttggctcatcgttggtttcgcccatattcctcttcttgaaggggatcgctgatcagcaaggtactctctcttcgatccccttcccccccctctctctctctctctctctctctctctctccgcgcgcggcctgtcgcggctgttgggctctgcctcgcgtgccgctcgccgtgctccgtgattacttctgtgctcgtcaggcttccttcgccgtcgtcatcctcgcgctcgcgcgacagaatatctcatgatcgatccgtggtgacgttccgacacgcggtcggtgggtcgttcccccgtttccccaccgtggggtgtgcgttggcacggcttttgcgcttggggacttttagcgtttgtgcccggccatcgtagcgatgcgggggaagttgtcggcgatctgctgatgcggctctgatcactgcatatctgatcagttacgtgtccgatccgttccatccctggttggcggtgaaattggcgtgcgtattcgcgtaactacatatctacatgtgctgtttgatcaatctcacgtttcggttatgtgcggtgatgaactgatgatgtagcttatctgaattctcatagcaatgggctttgttcgctatcaagcaagcgttaattctcagtacagtgctttgctttagatgttcagttagtataaagctattgcaggttctgaggtgctcctgacctgcttccacaatgcaagctaaagaatccaaaaagtcaaggttagatccatctcgagctctcaaatgccaaatttattgtttgatttaaaataaccatttcttcatttaagttagtatactgttgtgtgcagggacaggggccgggaccgtgtgaaatggaatgaagaaaatttgaatgacattgagtcgaccaagccagtaagagaaaaaatcaccgagcctaagacgccatatcactcaatgattgatgaagatgatggtatgtgctttggagcttgcatatagaatcatgttttaatacagctaaagaaaaaattccggacaacatgcatctgatgcttgcatctggtccaagggactgtttctccaaaaagaactattgaagaatcagtggataagtccactcatgctgatgcgattaagactgctttgatggaagctgtttcaagtggaaaattatcagcaagagaacatttggaatcctgtagtaatgaagaagaagaagaagaagaagaagaagaagaagaagaagaagaagaagaagaagaagaagaagaacaagaagaagaagaagaagaagaagaagaagaagaagaagaagaagaagaagaagaggtggccatcaaacaaggcacaggttagtaatctgcagtcttttcttattgacaatgaaaaacgaaatatccttgtgagtggtatcttgactcttaaagtcttaattggcattttgtattttgatgcttgtgcaagtcgttatgatttcggtgctgtactgccatatagcatatcatgtctgatacatctcacataaagaagataaacacaggaaggaataatttcaggtatcctggtctcaggctatggggttgattaagtaacctgatcctgtgatctgtaaatctgatttgaattgtcacattttagaccgatttgtcttcctagctccagaaaatatctactgatagaaagttcaagactcccttttgtctgattactcctttatccacttcacttgtttttttttttaattcaaccctgctgttctattggcatcatggtatgccagaccaaaacttttgcttgatagcaaggtaagagctaatgcagtgtacaccagtaggttagctctagtcctggtttagtagctagttggaccatcaaaatttgtataattgtaaatagatataaatctcccgtgtgtgttttcccgaatcagttggatattttttgtgggatgatgaccattggggaagactggttgcaagctgtgttgctattttcctatctctagttcagattccggaagtcctcaaggcactggtggatacgcttcaatttttactatctatgtgttttgcaagagtaacctcaaatttcaccatcttgttttgtgtttttttttcaaagtaagaatgactgcttttacatgctttcatatagatttcgaagagcaacggaaggctcactatgatgaattccgcaagatgaaggaactgcgtcggaggggaacgccgtcacaagagggtgatgaatgatgactctggcaccgtcgcacaactcggaagcatatgatcagcgaatcctcggcatgttaaatattggcagtggcaggaatgttttacagatatcctactaaaccttaaaaagctcatgtgactatctgttctcttgcttaattattagtactggtcctaggacagtaccaggtaaaattttggctcttattatggaggtaagaaaatctgtatcgatcttgtactcaaaacttatgctcttgttcatgctgttgattacaaagttcgcaaatgtgacactctctgtggtaatctggtgtgtaatttgtgcaaattctaagcaaatgcaaattgctgggaatattatctatttattttcggcgcactttgctgggcatcgttcagaaatgccaacgtcccactctgtgtgcgaggtagcaaaatttgcattcagcacccgcagtttctgcatattgtcataacccccctatctggacacggtcacacgaaaattggagttattagaggggtttatctgcaaaaggaacaggataaacctggccactcccgttactctcgtcgtcgacctcctcccgctgctcccgttgcggcggtcgccgtcgccgccgacgatgacgagcttggaggcggccgcacgcccgagcagccgccgcgtggcaccgtgcgacccgcggggacgccctcggcttccgccatggcggctcatcctttccccctccccttcctcccgcaggtaaagcctctgcttccttcttcacgcgcttttaagtggaattggccttgctagattgatagctgagtggaaatggaagctgtgtgtggagtttcctcttggctcttgtgattccagactcgatttgttcacctgcgccattcacatggagctgcagttcaaacccttaggttttagcatctgtgtaatttggagagtaggtgctccagttctacttatagacgaaagattcatattatagtcctggtctcagatggggatgccaatgactgaggtcctgttagaattgtgaatttcaatgtcagaaccaattttgcctcctttctttgggatcaaaactggcagtcattcttttcaaaaagaaaagaaagagaaagagaaagagaaatggcagtcatttaatttgtttgtataaatgcaaaagggtctcaattttagttcatttgctacttttgttttggttggactagaaaaccatcaagctaaaacataaactttcaaaagtaaagtaacattgagtatttaacattgtccaataattgttcactcttattcttatcatgatatcatcatcccatacattcttaacgctgctatctgttctacaggctttgcactctaatttctagacaacttcccatttgcaatgcacaatcatgtgaggttacttatttatcccttcttaagatcttctccatgtatgtaagcaactaagcatgcaagttatcgttacagtgcacatcaattctctgtgatgcagatacggataatctgtggttagccagtggtaatgctcaaagctccgctgctgttcggtcaaggttgcttgctgcagaaagagaggaagcaaaagctgtgctatcactatttttaagacagaaaggtttgagaagtatactggctgcacgaattgccaataaggcagatggtttcattgaacacctagtttcaaagctccacattacttacagatcacgatatgctgaaggtttgctttcttgattgtgctttttgcatatctattggtttgaacttttaacaacacgtttatttttcaggaagggagctcagcacaccggagattagagatgctttgattccatatctggaagccctttctaaagaacatggagatggtttggttgaggtggtggagaatttccccgatccatttgctatggaacgggaagccttgtcttcttcaatggttcttacgcccacaagctcaaataaacacaaggcaatcgctcgggtaagcgcaccaacctcagggggagcccttcctgagctagttctctatctactggaccttggcatggatcatgaagagatcaagaatgtcgtgcggaaattcccagcatttgcatattacaatgtggatcgcaaaataaaacctctggtggcgctgctacttgagcttggtgtgccaaggtcaaacataccaggaatcatcaagaagagacctcagctatgtggaatcagcctgtcagataatctgaaacctatgatgacctatttggaaaacgtgggtatcaacaaagataagtggagcaaggtgctttcccggttccctgcacttctcacatatagcaggcagaaggtggagacaaccgtgagctttctcactgaactaggagttcctaaggaaaacattggcaagattctgacgcgatgtcctcatatcatgagctacagtgtcaatgacaatctcaggccaactgctgaatacttccagtcaatcggtgcggatgctgcgtctcttattcagaaaagcccacaggcttttggtctgaacattgaggcaaagctaaaaccgatcacagaatttttcctggagagagacttcaccatggaggaaatcggcactatggcgaatagatttgggattattcacactctcagcatggaagataatctgcttcccaaatatgaatatttcctgacaatgggatacccaaggaacgagctagtgaaatttccacaatacttcgggtacagtttagaacagcggataaagcctcggtatgctcggatgattgattgcggagtgaggttgattttgaaccagctgttgtcagtttcagatagcagatttgaagatattctacggaagaggatggatggaatatgagatggtcataatttcggataaccatggtttaggacaatctcatttgtaacaagacttgatcgctgccctggtatatagtttatcagaacaagtagtgtcctggaaatttgtacttagccatgcttggcagctgaccaattgttattgacagtttgatgtataacttggcggtttatgatgctagtttagctatttttgcatggagtactggcaaatgcattttgtacagctgttgtggcatgctaatgcccctttgccatcctgaagataatgcacttgtatttgatatcaggaaaagttgcagcaccagcacgtataacatggattctcttgcacatcatagaagccggaaaacagacgaagtacatattctccagtatacaactaaaattttagaagctaatcagctataaagagtaattagagagtacactaaaagcatgcagtgcactagaactctggtttacattacgaatatgtaagtgcttcgccatcactcaccactcatcaaggttagtgataaaatggataaaacacagggaagccctgctttttctttaacaacagatgtttgccagggctgcgttcatgaatgcgctgcaaaacgggctcctccttgttttcctgcgcttcagcgtcagcatcgcatgggtgttcgttgtacttcagtgctgaagtttcagatcatgaagattccaacaatagccaacctaataaaaaggaagcacatcaagaaatgctgcaaaatgatgtgatgcaaggactgtataacgtaatttaccaaatgcaactaagacattacactgatgaggaaatacacaaagcagagaagtcaatttgacagaatcagtaaggtaaaacatcagaatttttgcttcaaaattagcaaaaatacacagttgaaaatgcaacttggaagaaatattccaatgccatcaacactaactccaacctccacagcccaactcaaggagtcaaaaagaaagaacgttgacactaaatatcagctatttttaagctttaagtgttttaagtttttgactatttatgccatgaagggcaagtttttcctcaatgcgtgaaagcttctcaattgaatatgtgaaaaatccgcagtagcatgttagccaatttaaatccaaacatgcttttcatatcaaataaaaatatgacagcagaccttttatcactcaattggttgatatatatgaataagttattatggttcacggctaacatttcagcatatgaaagatctgcttgcatggagtttgataccacgtcccgccatgttcaaaaagatttattttatcatatgcagcataaacaaatgaatgatatgcacaacaatcaactaaccagttgcagtagaacaagtttgagtgtttcaattgttgaagacttgaagcagcgatttcaacctactttcaatgtttgcacacatgagcacatatatagtgcaactatgagatgaaaaattataagaggccaactattgacaaagtgcagctcttagcagaattaaggcaataatgaaaatgacaaaataacggactacaaacaaaaaccactatgctaaagcctcttgggtacatgactaaattactcccagtaaagaacactacatcagttgaataactcatcggaaccatgaaaagtaagaacacaccatctctcctagcggcgcacattgagcatctccttggcctcttcctgctcaacctgcagggcgtcgctggtgtacttgctcagcagctccttcttcttccgctccaacaccatccgctcaatctccttctcatcgggtagcggcacatgcgcgataaactccttcccagcctcctcgcccttctctctctccctcttctcctcctccagcctcctctcctcctcaacctcctcctccacctcctcgaacagcacctccctagcagcctccccgccgcgcccacctgccgaggccacctcgccgctcactacccccttcatggcctcccgccgcacccgctccacacggtgccactcagtgatgacctcattgcgcatgcgcttctcggcaacggcctcgagccgctctagcatgccgtcttcgtcgtcgtagtaaccgtagtaccctgcgttgatgcgcttgtggatctcatagcgggtccgccgcttacggacctcgggtggcttgtcgaagagctcacggacgccagggagcttcttggcggcgccgaagtagcggtacccggggccgcggccggaggggttgggtatggcgacgatgttgccgtcgaggtcggtcatgaggggcgcgttggagctgcgggagtggtcgcggccgccgagctcgacgatgcggcgctcccagtggccgcgctcgcggaggagcttgttgatctcgtcgttgaggtcgcggaggcggtgctccccgaggccctcgttctggatctcggcgaccttggcgccgatctcgcggaggatctcggagcgccaccgctcggcgtcggcgaggtcgcggcactcggaggcgaggtacggccgccgctcccgtggcttccgcttctcctcctgcttcatcgtgatgaagcggttcagcatggactgagccttctcctcgtttcgcgccatggcggccggtcgggaggcggcggtggccggtggccgaaggcggcggcggcggcggcgaggttcttggggctgggagagcgagggtttgggaggcggcgggttcgatttggggatttgcgggttgggtggggaagagggaggctgctcccccgattcaatcgtgatgccttttcgggtcggtttggcgtctgatgatgatccaacggtgcggattgaatttgggattcaagtactcatttttgctattgaaattgagttgaacttgcgaagatttacgcccagaatttgaattcgtttttagtcaattcaggcatttgttcaatattgtacggaccatcgatggtggagatttgagaaggaaagtgatgtgttttgagtgcatatggaaaatgatctctttggcctttcaggatctttgatatggttagaatctgtttgttgtaaagcttaatattcgtgttggataaacttatgctgaaaattctatccaaatccagtgtgagatgttcataaatcacaagtacatatgctcaaatctatgcgatgcaatgaattgaggaaatcctagctggttaggtaacttattgaaattaagttataaacttaacacatgtaattgtgtatacggctttcaaggtgctaaagtaaggcgtgcatgtgcatttataccttgtttcacaaaaaaaagaacgcaatgatgtgtttcgaaaaaagacatatgtatttgccatgtttacattctaacttttttcttcaaacttctaacttttccgtcacatcaaatgtttggacacatgtatggagcatcaaatgtggacgagaaaaaaaacaattgcacagtccgactgtaaattgcgagacgaatcttttgagactaattgcgccatgatttgacaatgtggtgctacagtaaacatttgctaatgacggattaattaggctcaaaagattcgtttcgtttacagacgaaatctgtaatttattttgttattagtctacatttaatacttcgaatgtgtgttcgtatgcttaaaaaaattttggcacgtgaactaaacacaagtttgaatgcgtgtaaactttgaaacttgatagtgtctcgaaaatcactgggaggacttgtcaaaatcctatggcccttttggattccacggcccaaaccagcggacggcctgcttaaaactagccgccgacttccggcggacggcggcgccggaaacccccaccacatctcccggcgattctctccaaagtccaaaccccccatggctcggaagaggaagcgggggcggacgcggcgcgccacgcaggcggaggcggaagtggagcaatccgagcgagaaatggtaggggatgaagccgtggaggaggaggaggacgacgacgtcacgaagatgaatccgccgccggcgacggccggtgagcgcgaggaggaggaggaggaggaaggaatcgaggggcttctggagccgttcaccaggaacgagctcctcgacctcctggtcgaggcctgcctccggaaccccgccctgcgctcccgcctcgccgccaccgcggagtccgacgccgcccaccgccgcctcttcgtgcacggcctcagccccggcgtcaccgccgccgcgatggccgccgccttcgcccccttcggcgcgctcgacgagtgccacgccgtcgccgaccgcgccaccggccgctgccgcggctacggattcgtcaccttccgccgccgctccgccgcgcgccgcgcgctcgccgccgacgcctcctctaggctcgccgtgggcggccgccccgtcgcgtgccagctcgcgtcgctcggccccacctcccccgaccgcaagctcttcgtggacaacgtgcccgcgcgcgccgcccacgacgagctgaggaggctcttctccaggttcggggagatcgaggcggggcctctcggcgccgaccgcgccaccggccagttccgcggctacgccatcttcttctacaagtaccccgaggggcttacgaaggctctcgaggagcgcaaggtggtgttcgacgggtgcgagctccattgccggcgcgctcacagagtgaacaaggagaagcatctcatgaccatgcctgcagatgcaggggcacagagcaatggcttcgagaacgctgcctcacccatcatccatgtccagccgaaggagcttgcattggcatccaccacgcagacgcctcttggatcaaatcggccagttgagatgatggcgaaggggcctagatcaggcacggttccctttcgtcagaacgctggagctggtctcttgggtgcatgccctgtggctacggtcacgtcctctacgccagatcagagcacaccggttagccattctggagcttcaatttccacaccccggactgctcagagattggctaaatcaggtttgatacagagttagtacctttagttatagttataaatactatgagctattgctagcccacaaatgcaatggaacataatcacacagttaagtgggtactaacaacataggcattttctttctcaaaataaggaataacatgtgtgttttacaacaataaatctcatggttaacaaactacagtagaaataaagatcaaagtgtggttttgtgaggtgttttaagtttctagagacaacttagaattggtgaccgaatgcatgtctattgtctaatatagcatcctggactcctggaggacaatttgggaactagagttaagttatggcgactgcttttaatgcatcctctggataatgatgagaaagaataacctgtaatggccacgcatttttgtaggaccttcttatcctcattttacttggggtatccattttttgtaggagcacaaggatgaagagaaatatgccttttctctctaaaacaaggatgaaaaaagaaatatcgaagatgactcctccaaattctgaagttgttttctttctatcaaatgagaggattacctgcaagataatctcctgctgatcgaattgtgcttcaactttgatgtaatctctgtttgtttataggcagagctcatatattgcaggtaacacctgtcccgcctttatagtggggactgcgagtagctaacatggaagaagattttggtttacatattcagttcttgatattatttctattttgtcatttcaccatgcatgtggtaaagtagtttcatagaaaattcgacgaaaagtggaaagtgatgaattcacatttccatattccttcattccttttgagttttgactgaccaagaaaagaagtggtggctctatgcatcgacaatgagtggtccttgtgactttcttgtggtctcacatatgcaaccaagcacagggggaaggcataactgagatagatttgacatgttgcaggaacatggcacatcaacatgaaaggttcagttacttttctttttggttcagacatgattccgtcctgttcaggcattataatcagagttgttttcagccaatggatcaatttgagttttgtttccctatgctgcacatcccattgccccgacaggtctctaagccctcttgttggccatgcagcgcagcttgtgaagcagggcattgtgatcgtgccatggacagcactttcacattggtataacaccaggatggtggttgtcgtgctggatgaggtgggacaaggaggatgtcagtagtgtaaccttgtgatctgatgtcctggttctcggtaatgtgtggcttgctgtggagtttatcacatcatgtcaaaagcagatgcgcttgagtgcttccttcagcgaatggctccagtttcttgggcataattctgttttcatataagcacctgatcccccgctgtgcctagagctgtcaactgaagacagatagaatgaaaagaaaacttgagtcaaggagactatggcattatattgtgtcactttggctctctgtatgaacttggaggcataatctgaccaagactgcactcacatgttgggacagatatggatttataactcgaatggccttctgcttctgcaaaaattagctttgctgctggtggtggaatctgaaagcatgcctggtggatggtgggaggattctgaattctgattcatagtgaggtcatcagcatagatcctattgaattggttttcattacatgtgaggtgatggaaaaagaactcctaggcctatagcacctacaagctgtggatcttacagttttcactgtagtttccttcttacacttctaatccacaattagatgttgctttgcatgaatctggtagagtcttaacaatcctggtagagtcttaacaatcacgagggattcttttacttgcattatactattatacattaaccttaggcttctgtatcaagaagctgagatggaccaattatggagaattatcacatgttaagtgaaggtcatttcttctggaacactgtagtcagtgtttgtacagatcacaaagtaattgagaattaagttgcattacagtccagcatttactacccatatatggtgtgcttggccttatgcaacattcaatcgaccctcctgtttgtagaggaggaatgtcattatccaacttatcatctaatgtatcgtctgccaccacaaccattctctctttggcagttgaagaacacggcagccaccggtggtcctaggttgtaaagtgccgagaaatcccttgtgttaaaattttgtcgccatccaggtgcataaatggtctgttggacagattgacggaaaagcacaaagacaaagcgatgtattcccgctgttggctttggactttcatagctgactatctcatttcctgaaatagtttgtcaggacttcttagaacagattggtgtaagtgaaaaacaaatcttactgccattgttacataagcatttgtgctggattaggagtagaatctcttttgttctttctggcttaagagtcacttcaaacctgttcagatcttattttttgacgcaacagatatattatatgttgcagagcgacagtcatattatgcaatttttaagccgccatcattcaaatatatttgtaatggatcaatgtggaaggtcattgtggcagtgtgcccatcctgttgttttgcgatgagtaatagttttaccttgtgcactttttcaacagcaatagttttcatcatattgtttgtaaaatcattttgtagattttattcttgatagagttcctatattatttttaatgccaaaacaagctagatgtgaatatcagcatggttgccaaagatagtttcatcttaaagaactctctagttcttttaaatgtgtactcagaaaaaggagatgtaaaagaatgggaagaccataccaaagctcgcatttgttgtttctggaatgtccgtcaccaacctgtgtaacattcgcacaactttaattttgcttttattttgagcataataagcaagtgatttcaattccattcattgcaaatgtctcaggtcttaccaatgaaggtattctcttttggttggattgcttggacttggtgagtcaggatccaccatcacctattggtaagtttgttctcactctttgttagaagcataaactggagttcttattttataaataaattaatcatgcgaaacttgtgcttaaacattagtattttgccacttgtattgcaaaatcttagtatgtagtaataccttcacataaccacttatatacataacatgtatttaacaaaaccacagtatataattctaactgggggaggttttcacccaatgacttagcagcatagtgttgaacaccataatatctacctctttggtcatgaaccaaaggaactcctgtttggtttctaggggacagatgggaaagcatatatacatgctcatttcctcagtgaaataaatgcccatttctgtggttttatgaaacaagtgacgagaacatagtgacatacttatgttaaccgtaatttcctcagttattattaaatcagagcaatagtggtgctgaattatttatgcatgattagtttttcttgtcttctattaaggcaaatatgctattccttgaaattgttgtcctgtgcaatttgattattaggatctgagctatttgattgttatgaatagcgcttgtattcattacagggctctaggcctgactatatagatgtacaggtgtaagcccaaattcaaggaaacccctcacataacgtgggagggggggggtggaggggggggggatacaacacatactacatatcttgaataattgttcgatattttttacacaaaatgtagtgctgccaggtctactcaaatgtttgttatgtaacatgaaacatcttattgagtctagcaaagaatatggaatattcacattttatggctcagattgctgaaagcaattgtgattttttttactcatatataggcagatgtcctaaatgtctaggccaatgtgtataaattttaagtttaatctcttcatgcaaaggtgatgttatatgttctgacactagcaaatgcaaggtggtcatctttacgtcatatattcgaaataaaatatggaagcgcacaaggcctttctgtatcaagaaaaaacagcttctaaatctgtgcaaagtcaagattcttggttttgagtaatctatggatactgaaaacaactttgaaatggatgtactctaaattgttgtcctgcttgatgttttatagaatgccagtgatctgacttgggccctactattgtagcttaaggccatttgcttagatcaaagaaagaaaactttcttttaaattatattgaattttgaaatgaggtggacaggttgttatgaactcaccaaagtgtaaagtgtcctcatgtcacgaccagcaatctcaatccttggctcgttcgctacttgtgaaggcttgagctcagatccattagtcagttccctattgctgtaaagcactctgagtgatgctgatttgataaatgggtccaagatatccccaaccacattgcctacaacaagtggatcccttgacatagttagctacaattggtattttttcaggaaatgagtagtattgttctggggaggctgagaggctaacttggccttaactgtgaagttgggtgaagtgaagggttcaggtttgtgctctatatatacttgcaatcccaaatgctgaaccatttgtggacaaggaaactagtagctctggacgacatggtatcttactttaaactgtaaacaataatatgggttcccatcaaatgaaatatttcgggctgtccaccctcttggcctacaccattggtaagcagcgctcactgcaattccacgtaggtgaataaaatctgatggatcatactcacgtatcccctatacatagggtctaataaatagttgtccgtagtgaaaaggggattgccttttgacttgccacatggactgatgcatcatgttctttgttttcagctattaaattcccctcctttttcacagtgaagggtttgtagcaaacacaagcttcattcacctaaggctctttatctctgtttacaacttgctgtttatgcatgatagaaactaattatgtgttgatggtattgcagggatgatcattttttctaagtaagatgaattgctaaaggtattttaattggtataagcttggtgggatgggaatactattctgcaatgataaaaggtggcaatgggttttcgtgacaattgtatcaattgttggctgtcttctcttaagataataattttcatgtccctggatcgcacttgtatcaattggatgcttgagatgctagtttgtggtacaagtgtatggtctatatcattgtatgtcatcatccagaattcagaataatgtccagttcatctatcaaagattataatcagaactgtttgttttcacataatgatgatgattggggcatcgacatatatcagtctcctctccaattaactatgctgcaaatttgccactgataccggcttttccatatttctgtcatcttagggaaagccagaaagagaactgtgcctatgtttgtggtcaggtatgggtggacaccaaagccatccaagttttagtcctcttcggtgttgatttggatgcatttctccttaataaaaaaggtaccgacttgtcctattctctctctctcagagtcaggaggggattatattagagtttttcttatgccctaaacacttggaacatacttttaagatctattctgatctaccaacgtaagttgtggataaagtttcgattataatttagccttattctgtaattatgctctctctctctctctctctctcaaagaggtgtcattaaatataaagacatatactccgtcttcatttgcttttgcctccttgaattttctgactagcctatgttctatcagatattataatgttatcctagataaaacaaagcatctttgtagtgttccattcctttaataaaacaaagcatctttaattagtttcttattgatcaacaaccatatcttgctatgatcagctaatgcagtcgaagttaaaatcaccatatcatacttaaaagtttcacagtttcacttggagtaccggttctgttgtctaatgtgcatgtgttgccaatgcacccgcccaatcacaatttactcaactttaccttttctattataaattgatttgttcagatatgatgtttgaggcagtaacttcatgagttcttgtgaacacttgcagaaatttatttgttctttgacatatgtgccattccaattatgtgatcaaatatcattttcaaaagattcttgccaagttgctgccttttcttttaatacaaaaaactgccatggcaatttatatgtacttgagacaagagaggaggtaaaagcatgttagataaggtttacattgattttgactacttggggaccatagaatcttatttttgtatttatagttttatgtatactttattttttggatactgcatgctaccttaactagtgtattctgcatgttttctgctgtgcaagtttcggcacaataatcctgagactacttccacagtttgcagcaagttctgtatttgattagagaagtgccccacacgcttcaaatcaaaggtaactaacattatcgaacctaaatgttgaaacggtcatgccagcaagtaaagttgcaatgcatgatgatggattgatgatgaatactaaagctgatggaatctatggatgtcatttggttaggttatggctttacaatctttgatttttttgactgtggaataaagcagttccgtccttcacgtgggcatatcccattaatccagccactccaacagtgaatggaaacgtcccaaatgatggacaccatcacatgggtttccaaagacaacaaatggacgtttgacagagctcccagaatggaatttacatgaaggagacacaaaggcggaaagtttctttaggggtggaaaaaagaaaaattcctacaagggtgctgggcttattattgcaccggctacagcaaccacgaaaaggaaagctggcagaattttgacatatcactatctaccagtattagttaccacagaaagtgacacggcaaagctgtctactcccctgttgaagtgagaattctggcataccaggagcaaatactgttcaggtaatgctggtacatgctatatcttttggtggcacctacccatctttgtcactgtctgtagtgcaatgctagccactaactatctactatctgccttgatgaatggaggacgtaggctgccatgccatgaccgttgaaccgatcatatgattgcattccaggatctggaatccttccggaaacgactagctgtgtgtgtgcacttgaggtaagtcctatataccatctcttcttatgattggaagcattctgtctcttgctgccagagtagctgctagtagcaagtagatagcgtacgtgcggcattggtacatgtgttgcaagttgcactctgctctgctctctacctacctgcccatcaatggagccagtgtttttactcgagccgagtgccgcgcgccatggatggatatgaacatgatcacttgcccgtgctcacttcatccgatccagaattccagattccacagcgctcgcgtttgcatcaccatcttatcagtttcctgtagacccggagaaacgtcaatgacgtaaaggtaaggctgagaaggagagatcaaatgacaggtcggcattatgacactttgtgctcttctacatcaacgctcaaaaaggccattgcaatatatatatgtctgtgtttttggtttattgttacagttgtgacatgccacaattttttatttttggagcccaattataatatacttatgcttatgcctttttttcagaccttctattaggtaacgacttcgtgttgatcatggcttgacaaggtgtcacaatgttcagaaatgaacctgactatttcataaattggtcttattggctacatgccgaaagtgcctcctatttcccaaaagatgggctcatgatgatcgatagcgtcaactgcatggtaagctaatgtccaatctgtgttgcttttcttttgactggtactatttctggcgtcttactttttgttttttcttttggtttgcgtggttcgacttggatagttgggtttagtttctactctaccttaacttgcttgagacctgtttttgctgctgtccccaaattcctaacctagcagagaagctctataagactagagaaccagtcgatcgaagttttagagatcatggatacacatatgtaggctgcagacttatacttggcttgtttggcacaggttcaacgctcaattttttcggagctgatatttctagctcctaaaattcttaagagttgtagttaggatgaacgagcattattgagcgagatattctgtttggatgttggactagaattagcgtgtcgaaaaccactttattttattgtagaaactatattttctgaacctataagttagacctgtcaaacaccctacgtcaacaaatataagggattgctccatttatccacatatacaagggatgagttctacttttccttcaactgtctcatttaagcagttacaccaaaagatgttatttatcctaatcaagtactccctcaggacggagggagtaaagtttatgggacatcattgagtgaatagctaatttagtccctcaagtttcactgaaggctcaatttggtcttttaggtttcattttatccacataggtcctctaagtatttgttttggcttaaaattatccttgggcccacttaatatgccatatggttatttctagtcaacaattctgttagaaaatgtcccttccgctcttaatttgtatacaactatacactagaaaaaaaactaaaatgaataaacaacattgcatatgtacttcccattatttcaacatgtgcacatgaaacttgagcctaatggctatcgtatacacttgcaagtacttaatttattttgttttatataaattgctgtgcattatctataaaaagaattcattgcatgcaattttttctcttatatatgtgaatgaggggtataagtgttatttatcaagagagttgttggttatgttggtttaaggataagtttaaattaaaataaaaacttgaaggactaatatggataaattgaaatattaaagactaaattgattcttatatgaaacttgaaggaccgctttagccttaaactctactccctccattccataatataaggcatagcatgcatgcatgtaggcaattaactatgaccccttctctattaaattattacttttttaaatactttactctcatgttctctaattctattggatgcatgcattgtatttattaggatgatccaaactacaagatgataataattattttcttgatttttgggttaggggtgattatgccttatattttagaatggagggagtacaaaacagtctatcataaaatatattagtgacttaggattggatgggacacattcttataacttatagcgacttcttccgtcccatgaaatttgtcgttccaagttgtttagcatgtattaaggttagaagaaaaagactataatattccttaataaataatgtataatcgaatgtaggatggtggttaggggtagaatgggaagaaatttaaattgaaagtggttgatgtgacaagtactataaagcgacaattattttaggataattttttagtgctagaaagacaagtattgcgggacggaagaagtatatagaactggatgcgatacatcgttataacatggtaccatgatatatctatttagatatattttgggactgaggaagtagaatggatgtgagccgccgctccaactcaatattcccttggacggagcaacgaaagatcgcagtccgaacgcgttgccgcttgcatccaaccattttccatagcaatcacttcgtaacgtcggtgtcacagccaaattccgcagttctcgctcccatgcatggttcggtgtactaactggaaacaaccgatgatctccgccaatcagcagcaacttggcaaaggagaaaagaaagcataaagcccctcgtcgcggacgtcatgtgccagtgacatcaccgccaccaacttgtgtgagcgctttgatgacactctcgctgcgagaccgctgcagagcgaagcaacagcccgtggtatttaatccgagcttctgccctattagcatccagattcattccagcagcatcgtgtcctggactcctggcccttgctgccttgcattcctgatacgatctaatcctagatcaaccatcacttttctctctgctactccctccattttatataggggtgaaaacagagctgattcggactgatagtagtcataccatatcctaaaccatattttttaagtggattcgaagcggttgcggatagtgtgcggatacggatacagagcggattggttcggatgtcagaaatggagtggagtcggtgcggaatcggttcggaaacggattaaatttatcggatgttacgtgtatatgcaatcaatacaacatcgagttagcaatgcaatgaataataatacaataattaataaatgacctatcgtaataattatatgcttaaggctaaacaagtaaacaacatgaatacattatgtccataatataaaaaacagctacgtaagtataatatgagacggtgaaagtctcatattaagaaatctaggttaattgatgaattagaccattggatggaccaacttatattatatgtaatagatagagtggttacatgtgttaataatttcgtattatccggcaaacgttctatcggataatccgatagaaaagtcagataatccgcatccatcggatttcagaaataccatatccgcatccgcatccatatccgccggatttctaaaaactcctaccatatcctcgttacggacggattcggagcggatcggatcggatattatccgatccgttttcacccgtaattttatattatggagaaatttaacaatattccatctattatgttgctttgaatcgatcgctagtcaaatttctttaggtttgataaaaaaatagtaatatctataataccaacttagttttattaaatataatataatattgaatatattttgataatatgtttattttgtgttgaaaatgttactatgcttttttttataaatttggttaaactcaataaggttttgatatgaaaagttaaagcgacgatttataatataaaacgaagggaatattacataattaacgtgctgctgtattcttaatctagatcgagcatgattctggaaacgtcactctcagtctgagatatggttcggcctgtaaggaaattaagagatgattatgcactgttaggcacctgtaatttggctctctctagctccaagttgcagaaagctgggcgttcctattcgtaatgcagcattagttttttttttaaggaatgatgcagcattagtgagcagtagtactagattctattctagttaagcctgcatgcagtgatgcaggtcaggtcagttgaactaaagaattcaaagcagccgccctaagctagcttgaagcccgacactcgaataatgcacatatcattgacgagagtgagaggagtgtggtgctatatgcctttctttctttttctgttcctcgctttcagatcgccgggcgtgcattgcatcgaccggtttgcaggtcctttcccaaggtcgcatatcgcatcgatctctcaaaggtgagagatcaaatataatccaagcgtcatactactagtcaaagaacgcgtgcacattcttaaaaaggaagagatcttaagtggtgatgaacaagttgggggcagccagtgaccattggcttcctcgaaacggctaagggcccctttgaatcgtagggtagaaaaaacggaagaacggaaaaaacacaggattctgacaggaattgaagtgtaaaacagaggattgcaaaacacaggaaaaacacaggaatggttatttaattggagcacaggaaaaacgcaggaatcggatgagagagatagaatcaaaggaaatttttcaagagattggagctcttgctaaatttcctccaaaatccacatgcaatgtgccattccatagaaatttcataggatttgaaaagtttcaatcctttgaatcaaacgatttatgtaggaatttcatagggcataaatcctttgattcacagggcctaaatgggcattggctatgatatggcgcatggaaggaacattggccaggatccgtgtgcgcgtggacggcccaatcgccaatcggccgatcactcaggtcgttcggctgcatatgtaatgcccccgtttgcagtgacggcgtaatagtcaccacgtagaaacataaaccagcttccgcggcagcggttttggagtgaagagactcgtggaggtgaagtcgtcctctttcaaggggtgaaattattggatgaaatgcttatgattccctagcttccaaagtgtgctaaaaaggctttttatgtagaagaatgttttaaattcattttcaactttatggtatttatttcatttgtatccctttctttttaaacgaatagcaatagacaacaaagttcatattgatatagtaggagaaaaaaaaacaaaactacatcgccaagaggatataatcaggagaaaacaaaagaaaaatagccaaaaagactcggtcagtgaggccaaacacaaccagctaaccacaagttgaaggagcatagcattgtgttagttatcgttatgtgagaccgattgtcgctaggcgcacaacggaaccacaccacccaacaccagcaacgctagacaatcgaacagagacgtgtgtttccgtttgtcatcccagctttgaattatacagggagagtacaagagagaagaaagatccgcttgtcccttgtataacccattgctagtatgacaacgaggtgctgctcacaaatgccctcatacaaagtcaaccttggccattagttgatcatcgaaaaacgtggactcccggacgccaccataaaagagggttgcagaggaaaagagcgagagggaaaaaagatccactcatccctcctacaaacctgttgccatgatgataatctgagggtgccaacgctaatgagagaaagttgttagagggcgatgcgcaaagacatagcctccaatgaggtcatgataccgagaaatgctatcaccgtcgcccacccaattaatttggacaaggttttcatctagagagtcccatagtggaggagaattaaggcaccgtgacaactagaggaggataatgagttagctcgtctcgtttgagcttgttgttttaatgagccagttcggcttactcgttaacgagctagaaggttgactcggctcgacttgcaagctggctcgttaagctcgttaatgagctatatctcatttaccattttatcatatattaacataataataacactaaatagtaaacaaagaactcactaaatatgaatagttttgatgtaattaaaatactaagcactagttaaaacactaattatataaagatacgatgatatcttatactaacgagctaaaagactagctcaattcgactcactaagactgtaagtttgagccgatccgagacgagctctttacgaaaccaatctaagccataagtttcgagttttttatccgctcctatcgacgacacctccaatggaaatcacaacgcccaaagcgtcgccgttgccgttccggcggacttttaggctcggctttcgctgggagaagacgcgtgggggtgatgattcgtgattacacgaggggatacgcccgtgccgggctgccttactgctacggcccacggcccaaacgctcgggccacgccatctgattagagatttgatcctataccttcctaaacatttgaggatttattcactttccttgtctcactgttatgctcgcgctgcctcacctcccgggagaagtgtgaaaaaaatctttaatatagtttaaatggtatatgttgtgagatcatataatgtcacttgtcaattttcagggctaatttagattgctgtcaaaataaacctttctaaaatttgacaatactaaaattttgataagttggcaacattgccaaatttcgatagaatcgattaaatatgttattgccaaaattctttaggtattatatatgtttggtaataaactaaatgtatccatatgtttatcaattttactttaaaaaataatatgatttaaaataacatcaatctgaacgggctttcaatttaaatggaaagtataggatcaaatttcacccagatggagagtaatctcaattgttgttgttaagcttaaccattaaggcaaggtatcaaattgttctctataagaaaaaaaaaaagcaagccacggaattggtgatctggccgtctcactgccaagtgggccatcccacggatgcctttttttattactaattaacgccttcttttcctactaaacgctcccatccctcctcccgttccctcgatctctgcctcctccccccaccgccggagaaggtcgccgccggcgagcgagcgcgcccgccggagttgtagccgcctctctcccccccgcggcagcctgacgccttcacgcagcgtgatctccttccccccctaccgctggcggggatccgtgctctgtcggtcggtaagccctagcccccgcccctcctcgcagtcgcagctcgatccgttcccctccacctccggctagctccctgaacgagcgccgcgcccgggatttcgcggccgccgcggcgctgccgcttgccccgtgcctacgcgtggtggtggtggtcgtgtcggcaaaaaccctcgcgcagctctgtctcggccctcggggttctccctccgggtgtgaggtgtttgagcatggggaaccgtgggataaccgtggctaaaagcacttgaaatcatctagctcagcgttcacttccctgttaatgtagactttataggtgatgaggtgaatcaagtaaaatgtttgtagcatttcacccgttagagtgtattcctgttgaagagtaggagatccttgagattgttgatgtccaatcctttgtattttgtaacttgttcctgcgatacctattgccgagcaatatgttggtgttgggggtgtgttgggtaattggagcaatgcaagctggtctgccagatgtgcaactgtcttgttagactagcatggaaattagtttgtacttttgcacattagccagttaacacgaaacagatttaagtttggcatgctaggaaaatctgcgtcatagatagaggcttctataaccatggctagattttctgaaaatgtccgcatgcagtcggaagcttaaaatgttattgtgggaatccaacttttccctatttgttggacattattctactaatgctttgaatgaactggcaaatgttagagttaatctagcatccactcatgtgattttatcaggttgtactcactgaacatgcttcctgctggctcttactggccccaatgcgattacgcttgcaagctgataggttgccgcctgctcctattgccctgccccctgccccctgccccctgcttgcgttcatggataacagagtgtagactgagatgatactctgttttgtaccattccaaccagagcaatggcaaactggcaatgatagtcttagactcttagtcctagtcccctagacttctgaaacttttttataagaaatggaagaatgcccaagtacaactaacacttacactgggaatgtttgaagaatgatctagacatatgactaagttctttttctctacattgtctgacatccctttgggatttgcagagtgcagactgatcttctaatatttttcatagttctgctaaagttgaaatgtgacagactgacagtgccatggtgctaattttaatacttggacacattttcaagaaaaataatatgctggtatacctttttttaatatatgggtatctgaaactatgcaggttcagttggtggactggtgaactgaaacttattgcttggtgctagtgtgatggcgtacgagattagcgagatcaaaagtgaagttctattctcgaataagacttacatacagcaagcaatcgaaacacttcattggtctaatacttaggacaaatttttttgcaacatgtatctctaaacttttagatcaccccttaaactttggggtaaagtccatttcttaatcttacaaaatggacattttgcgcactaatcctgaggatagaattaataggtcactcaatatcccatgctggttttaaagttggtttttgccaccattcgaccatggatactggcaacaatttctttccaccagttttagaggtggtgttatgtgtgattataaaggaagatggacatatggtttgcagggatttggagtttattaatagtatagtaggtactttgtctacagcaattattttcacattgtaattgttcttattgaaattttaaagctaattgaaaagcatggcatacaagaaaagagagatagagaaagaacttggagaagggctttaagaatagagtatttcagtatagtatctacaatagtaattcaattccagtttcagaaagttgtcacatattcactcctgccgatctcacctattttacctctttcacaccttagttgagtactaataattttttaatttgtctatgtagaaattggcataggcctggtgggctttggcatcctattctcattctttggcgttatccttttctttgataggggcttgttggcgttgggtaatgtatgttacaacgaacaaccccttcgtctgttgtgtcagttaatatcaaataaaactttattgtggtgttacacttgctatctttcttcttttagattttcttcttgactggaatcggcttgttgcttggttggcaatctatgtggcagcttttcacaaagaaggcaaacattaaggtacttgagtcaaagactttgatagatacacgctactatccatttctttcttatctatgaatggataagatgtgacaccatgctacaattattgttttctacttttcttactaaaattagataataataactttgtagttggtcaagttttcaagttgatgcttgtcctaatatgcatggcaatgacataatagttctgcctacataattttgtagacaacaaacttgtttaggtgcatgtattctgcacgagtacaggcatgatcactagcctttaatctgttgcaagattgctatggaacaaagttgaactatagatatctggtaccggtctactggacatgcaaagtattgtagatcgcattctccaggatagcaatttttgtattgctgcaatacggcataattgattggtccaacttatttattgtttctgtgcatcacatggatttctctccacatacatgtccagaagaggtaatgagtttatttgggcagggatctgttcctttcttccttggtctgtttcttctctttgtccgatggcctgttgctggcataataatggagctatatggatcttttgttctcttcaggtcactgtctaccagccccaactttttgtacaatattcatttcttagtagtcctttttggcacttatttcgcttcccttccatttcttgtgcagtggttatggacctcctatccaggccttcctataccagattccagtcattggatggattctgcaatacccattccaggtaaagtttctcttcctatgagagaaggagggcgatcatgatcaaattgatgtttcatggttaatttttttttttatctttattctgccatgagtcctactctattgtcttcagattatggatatgccatatggatataactgatgttgcagtattcatctggtttctgcagctgtttggtcagttcaggcgtaaacgtgcatgacaactcacggcagaaattacccttcgtacgggagcatattttgtgatgttaatacggaaacctgctgtgtaccatctgccacgatgcagtttaattcttgtgtgcatattcatactttcgcctttctaatctggagtttatctggcttttgctcattttgctaactggcagtagtttagtgttcatatatagacgatgtagaggcttcaaatgattgttgctagaaatttgggatctgggtttagcaaaacatgtggatcttttagcctatttctaacaaattgtgagccagtaactattgcttgaaaggtcttacaccgatgattcttccaaagaaacttacgttgtactcccttcatcgtaaaataaataaacttagtatgggatgtgatagtccatatccgtagtacttaaaaaatgtcacatccaggtttatttattttgaaatgggtggagtataattgtactaggtgtctttattgggttaattcaatccatgccactacaatctctttgattttaaaaaatacaattactattcatgccattacattttgataaaaaaaatatatatgccactatatactccttcaatgtattcataagaaaaattggaccaaattacccactcttcttcctcctccctctctctcctctcttacctgggatccaaatgaagccatggtcacggagcttctcgcgctagctgtgttgtggcgtaagagcagtcccaaccctctatctagaatggtgtctatggcattaactacattgccatgtaagacttttagcttatgtggcaatatattaattaagagatagagagagtgaagagaggaagaaactgggtctcatgcaagacacagcttcaacacgagaacatatacactagacactatcaagttttgcattggaagataatagtgtcttcataatagatgaagaataaatatgattggtagagaataaatatgaatgtatttattaatggtccactttaagaaatcatgggttatatggtgtatttctattgtaatatcttattaacatggtaccatggacactgcttatggacactatgggttgggactgctctaatggatgagctgcatggtgtgctggcagttatgcttcggaaccttgccaccggcacaccattggaggtcgttagaccaacgggctcgatggggattggaccggtagaagagatgattgattagagagagagggagaaagaggaggaatggtaatatggtctaattttttctataaacgcattgaatgggtaagtagttgcatattttcattttctattaaattgtaatataatgtcttcaaatacacgaataagaatgatattttgtaaaaatcgaagaagttgtaatggcacgaatccctcgtttattttgcgatgaagacttagagtgcatgtcaggcatatttttcaatttactctttttttgacagcgactcattgagggttaaatgcatgtgattatgtccatactgcaatagataatgtgcatataattagtccctggacctaaccagcgatgatgcgctatgagctcatcgtggatctcattgataatgcatttgcgcctctcatcattgctgcctttgaatcttgcttctttttgttcttttggcagaatttgccgtcttggccagtgccgtcctttgatcgtctatatctatggagatttcgatttgatcgcggtcatctctatccaccgagtcactgtgaccccactagttttagacgttttgtcattagaatttgatgatggcgattggttgctgttagtagcgataaactagtaatttgtttgtttcttttgagtttagcatttgtttccaatgatcgttgcgttgaaactaaaccccaggccctagcagaatttctaccgttttgtttcttcaggtgcttgcctaactattgcctatataccaatcaccaagtttgcgtaggtgtatggccatgatttacctaaccaaactagttagccagatgtgtttttctaagctaagggaaataccatgtttttgctctcctatgtcataaaatatttttgattgttttgtttatttatttttatggcttatctgtcgtagcttaaatgatcagagctactccctccgtccaaaaagaatcaacctagaaaaggtcacccgtcaaaaagatatatcttaggttaggttgattatttttgaaacggaggtattacgcttgaattctgttggaaatttctctcaaatttgtgccttccttccaaagtagcccttgattgcatcagcgcaaagttgatgaaatagaaaattcctcatcattgcgagagtacaagtatcatttcgtttgaactatacgcctccgtttctttttctcgatccgttcacggggagagccaaaacacttccaattttttcctgccagagccttgcattctcatacgggaccaacggacagcattttggtagagtgacaaatagtaaattcttccgatggcaagggaccaccactggcaacacctgttactgctctgctgtgctcactacggacataactgattgctctgagaataaaaactagattgtttttaataaactagattggtagtcaatttataaaaatctagaaaaactgaatcttttttaagaatcatgaaaagtgggtttactggtttcttgacttctagttggttttctgcattagaacctaggaaagcgggtttctggattctcacctaatagtttgttttgtacattatacaattatattagaatctgaataaaaagctagactcttatgaattaggacatgcgttggagaaactccctaaaccggctctagattttatttactcggcctttgcccattgctcggctacactggtcctctcttgtgccacaagacgtcaaagccaacaatcatcggcagtgctgaagggtcccgcccaattactccgctttccatatgatttctccgagtgggggatagccactgctagggctagatgcaaaacaggaggaaatttcttgaatagtaaaaagaattactcatgtgtatcataaaattctcgcacagctatagtttcccttattcgcggaataagcgaaacaacatatttgcaaacgaaaagtaatttgtaaataaaactatatgcatgttcttagcgatctaaaagcaactgaaaaataaacttcgatgaaaaaaaaacctcgaaatcagctccaaatttaagattgaaaaattcaaattttggttcataagtataagtataaacgaaaagataaggcctttgagaacgggagatgcaattgccatcacaatttccatgtttttccctaaaaaaacaatttccatgttaagggatcaaatgaccattagttgatacactgaattcagaccattgctgctatttgatcgtatggataagacttgtagttggatccttactaacaaatgtcttctaaacgtttactttctggagtatatattaattttctttcatatatgtcagttaagtcatactccctccctcctattttaagtgcagttgttggtttctttgttcgacgtttgatcgtctgtcttaaaatattgcctactggtgttcgaatgagtaggatgggatgtgcttatccccacatgcaaaacgaaatgtctcattagtatatgtttaattaaatattatatataattgttttaaaggaaaatgaactaatatgagtttctaaaacagtttatctataaagaaaatgaagaaaaaacattgtttaattgttcactaagcgtgtacgtgaaaatggagtgagtagaagtcgtcgaacaaagccttgaaaagttgttgtacccaaattttccaaattgttttttttaagataaagtataacaaactgatactccctatgtcctataatatagcaacgaatctggacaggtatctagataggatatttcatataacaacgaatctagacatatgtctagattcgttctactatgaaatatttcatctggtctcaggttgtcacttttctatccagatttatcgtagttatttactactacgtcgtcactatagaagttggtaaacgcatgtaatttacactttttactgccacaaaaaatcccacctgttccaaatcctactcgtgttgtccccatgggaacaaggcaacaagcctccctttgcagcgccagaaagattcctagtcctcctctcctcctcccctgagtcccctcccctccccagctcccctcccctcccgtcacatctccgcccaatgtggcatataaaatcccccagatccagccctccccacctccactcccttcctcattgcacacacgagaaacacagattcacacccacgagtgttcgttcgtgcccgatcttgcaggtggctctgtgttccgttcttgttttgttccggtttcttgcgctaatccatcatgttcgcaggtgggggtggggggttggtggtgatgcctgggcgcagtggtttatcgatcccttccctgccttgtggcgctgatccaggagcggcgaatttctttgagagggtgttctttttttttcttccttttggtccttgttgcagccaacgacaacgcgggaatcgatcgataaacctctgcatccagttctcgcctttttgtgttcaagggcttgaggcagtagtactggctattgcttcttgcttcttggctgctcatggggtgtaaacatgtttactacttgtttaggcttgatatatatgtttatgtaggatatgtctctttttaatgacatgactatggtgatagaactgtaaaaatcttttattctgatggttgcatgatttgatatgtgcttctgataggttcttttattctgatggttgcatgatttccatgtttacatggtagctgtaggttttgcactacaaatttcccctggatatattgtctgagacttagcatcagccatactttgaccatgccattgctaatgtgtaaggataatgagatgatgcattgatgcttgatgtaatttgtgggctttggcctattttatgcttccaaagtattttgcaggtgattgtgtggttttgttttgtcttctaatagtgggaataagttccttgctctagagagattagttctcaattgcaatttgtatccattaatggaactacgcgaggtggattcttgttggatcttgcttgctgccgtcatgagtcatgactggaacaggttccagttcatgtggagtgaatcaaatgcagaatacgttctaatgccaatgggtcttcccttgtattcccaatattcttttgcctattgctatggtaaaaaaaaagttgtttgcaataataatctttaaaaaccttttaatttgtacttctattgaatattattgtaggtagtgaatccatctcttgtctctacaatataacccctcccccccccccccccctccttgtcttctgtaattatatgaagattagccagcaaagttagatgtaaaataagatactttctagctaatgactgctagaatggagtaaatcggtaaatgctcataatgcattaggatttttaactttgaattttcttcatgaatacctttcaaatctaggaaagctcaggtgattgttgacattattcgatgcttcctacaggaatcaaaaaatgaaggtagccgtccttgattctgtcaattagatccctttattctaacagcgttgcctctaacctaaagaatgaactgagtgcacaatgtctctattgctgaggactcgttctgttcaccaaatgaaaccttttttttgtggttttgtagattttcagagactcagaccgatgcttgttcatcgccaggtgcccaggttttccgttcttcttggtgaagttaagtggatctgccgtttggtggctggtaatattgatctgaatctgatacatatcaattatatgctcggtgcttgttgattgccatcaataataccttgtgttcatctggaaaatatcatgtatagtgtatttaagaactctgtatcagagcagttcgaagattgaagatttcggcaggctactgtggcttgcccaaccttgctgtatcactgttttacaacttcctaataggagatgtgtttatgtaactctgattagataccgttttatttggagggattatataacttactactctctccattttaaaatggacgacgttattgacttaagacatgtcttttgatcatgtgttttatttaaaaatttagtgtaactttgcaaaaaaatgtaagtcatgcttaaagctttaaattacttctaatgataaaacaagtcaacaaaataaatgacacgtgcatttgttttgttttaataagacgaatcgtgttatgtcatgtataaaagttagcagcaccatacattttaaaaactaaaacgaagtttttttttgtttggaaagtaacattgtccgtttatattttaattatccgttctcagaggacgttttgttcgttcgtatgacaatcgtattacattgtcagatgttggcacgttgaaacattgctagctgaggtgactgccagttccatttttcttacaaacagaacaaaattgcctaattcctcgaaaaaaaaaaattctacttactggacggtacattaacgtgcccatggtacattaacgtgcgagggcccagaagcgacggtttggcccaatctggccccaagccatgtcttgtgtatccacgtgcactcgagttattatattcatgaaaatgaacaagaaatatcaacaaatcgagttatctgcatggaaatgaacaataatactcctatgtcaacaggtcagcctgctcctcagtaatcagcacatgcttatcctcattttggcacgatcgtcatgttcggtgatgtatttaggatttttatatggctgattcaacttatataatttttttaaataccctaaatataacaaagttagaagtataaattgatcatatgcgttttaaaaaagtttatttacacatatgtatatatatacattggattagaaatgttttgggtgattccgggaccatatcccctagatccacctatgaccatgtccgtgcgacaattcaccgtcgacaaaagaaatatcatattgagttgaatgcacgaggttaccaacgagcgcaagcatcacaagttcgagcaaactgtcaccttagatgtatataggttgcgtaggacccagaagcacaaaatctcgtgagcagatcgatcagcagcagagcagaatggctctcctctccttttggtcacgagaacggatgcgatcttggccatctcttttcccaaaaggaaaaattggcaagattttgctttgcgcctttgcctttatttttcgccgctcacgtctacatcggcgacgagctttccgggagcatattgatactactagcacagataaggaacctgacagctcaagcactagctgctgctgctgaaattatggcaattaaagagagcgtaaagcagcagcagaagttgttaatcacacttggcacttgcaaagaagggtaatcaagggagagtaagagagcgaagggtgtcatctgcatcccgtgacaatagatcagagaagccaggaggtcaggtgaaaatttgataggaaagcagtggccatcaaatattaatgtagttgtggctggattacaagacgatcagctcgaacacaaccaaccaaactgaactgaatgatgctccggttacaccaaccagtatgataagacaagagaaaattctctcaattcctacgaaaattgaaccaaacaaatcttactctcagtacatttctcctgcatttatttacagtaccatcaagttgtattgttttttgtataaaacttatatttaatttacaaaagggagtgaaagaaaagggtatccatatgctatgcttgcatttcggtttcgaagaaaatattcatacgttagaagtcaaaaaaatacggagaaatcttcatctctccctctgtcactgccggcctccggcgcggccgtctctacggccgccgtctcgccggcggcggcggcggtcgacgcagcgaacgcctcgtgcagcaccttctccacgtcgagcgcctcggcggcggcgcccgcgtcgtcgtcgtcgggcgtcgggatgaacggcggccgcgccacgtggaggacgcggtcccagtccacgccgcggaagaaggcgtgccgcttcacgccgtgcgcgccgagccgcctgcccgggtccttctccaggaggagtccgatgaggtcgcgcagcggcgtcggctcgccgggcatgtccggccgcgcggcgaggacgcggtggaacgtctcccgccggctccgcccccggaacggcgtgcgcccgtacagcatctcgtagagcaccacgccgaggccccaccagtcgacggcgtggtcgtgcccgctcccggccacgatctccggcgccacgtagtcctccgtccccacgaacgagttcgacttcgccgccgccgacgagcagcgcgtggacgacgaggaggacgaggccgtcctggacgtggacggcggggaccgggacgacgaggacgacgacggcgacggccgtgacgccgcggcgcggcgcgaggagaagcacccgaagacggccgcggcggccttcgtgctgtcgcgccgcccgccgcgggagcgcgcggtttgtggcggcggagccgtgtcgggcggcggaggaggtggcggcggcgggagcgtggtggagaggtcgaagtcgacgagcatgatgtggccggagtcctggatgaggacgttctccggcttgaggtcgcggtacacgacgccgaggccgtggaggtgctcgagcgcgagcaccagctccgcggcgtagaaccgtatcgcggcgacggagaacaccctcccggcctggcggcgccgcagcgcgttcaggtcgccgccggcgcaccggtcgatggcgaacccgacgacgctgtccgtggccacgacgccgcggagggaggggagcagcgggtggcggagcgcgagcagcacgtcccgctcgaaccagatcctccggtgcccgtcgccgcccggaccgccggcgacctccgcgcacttgtgcctcgccgcggcgcgggagatggccttgagcgccatgggatcctcgtccgccgtcgccgacaccgccgcggcggcgccgccggcgggcacgacgtggaagacgacgcccctggcgccgcggccgagcacggagagggccttgaggtcggcgaggctcagctgcggcggcagcggcagcggcggcagcgaaggcggcatgctcaccatgggcgcgcgatcgcgagaagcgcgcgggaagaagaagcgacgcgaactatattaattatatttggagggtttgaggtttaggtgtgagctaattcgtctgggttggcttcgtttatagcctcaagctaatcaccgtaattaacttcaaatggaagcttatgaagaggcaaagctacaataatccgtgtattaatgcctgagcaatagaagaaaaaaaatcaagttagcaacagcaacatgcaacataactgtagcttccgtctagaaaattcctgaactaattcacgtgtggtgtgaaaggcaggttaatcagatttgatcatgtacagtgagctgtcatcaacaccgaacaggaaagccaacacaaaatagactggagtagtagtaaaccgacgaaataacttagaaaagttcacctaattctcgtgaaaaaggggggaaaaatacagagctctaggctcgccattgtagtggcatatcaatctgaatcccctgaaacgcaactcacgtgcaaagtcctagtactttctttctctgtagctcatcacattcacatcgctagattggattggaaccctatatactgttcatgacagattgcgtgtactaccaaaaaaaagatccagtaaaaacatagatatttcagtggtaagtttgagtgtccatggagcacaatcacaagttgatactctgatgtaatgctgcaccgtatctaagcgcatttcacagcctttgcattgcatcggttgcatccagtgcaatttgctgaattgaggtcaatacacaggaaatattctgctgtttacgtcagtaagtgaggtgtgactggtagcaagaatctgcagggctactgatactttagcaagttgtgataaaaccggtggatgaacagaataagaacctgattccagcatgaaagggagattccacacggtacttgctactcttctgatttctgaatggttaattggcgaccgatgctgattctcaaccttttccagttgaagccccagcagtaggcatgataagaatcagcacactgcaaatagatttagttcagacaaaaagaacacaggaaaaatttgcttcattgtcaccccggttgctctggaagtgtggattaccttgacagctgggagtgacaggaaatagctgttccccctgctgaatgatttcacatgatagaaatggtgaatttatcgtctctacctgtcaaaaaatactcaaaagactacacagttgatatcagtcaccatagtatttagcacactggcaaccacatatgctctgctgaaaactgaaatgagcagcacactaaatacacaataatagcagaaaccagagcagagtgtacaagtagacatttccgcagatgaacgatctgcagtcaaattgccataacactgaacgttgttgaacaagattacaagcatgagaacttatgaactggacagaaattcagaatttataactcgaacttcactcaaacaaggtaaaattaaaagcggataactggatatatacatctcaagttgttcacaactacatgctcccttttgtggctattagaccacctaactgtgtgcatcactgcatccttgatgacaatactccaattatctgaggcagaagcagtccaatcctcagaaacatgacagtattacagcaaccagatgtgtgcattctgtgaacgatgcaaacacaacagaaccgggtctacacatccctagaaaaacaacagtagaacacttggacatggctcattagctattagatcaagatcacacagttcccgtggccagtgatattaaaaatggaggccaactgattttactcaagattagctgcacacttgagtcactgaaacttatcttatttacagcacaacatgatctcctaattcttcctttgatgttaatattccatccttccaggccgaaacacaaagttccttgccttgcgggagcacagcaaagttgccaatgatacatagaagctagtcattgtgctgatacagaatgcacctagggatacccatccgttctctccatgccagccaccaagccaaccatggcgattgcttcctgccattttcccttctggcatcctagaatgcgcactgcatccttccccgctgcatatcccagggtttccagccaatgctcctggaaacttctgcaacccatcagttgtcggcaaaggcccagataggctattgtaggagagattaagcacctcaagctctgtcatggcagctatctcaggaggtaccacccctgacaactcattatgtgagaagtcaagggtccgtagcttccccatccccccaatacctgaaggaatctgcccatccaaataattacaagagagattcaaatactccagtcccttcattgcaaccaacccgtctggtatctccccacggagctcattcctagacagatctatcccggtagctgcttgaagatcatagcccagctccaattgccggcctgccatatccgtggacactgacacaaacagctgaggtggaagcacagcctctgatggactcccctgaccactgcctccaccattaaggacggcactgacattgaacccaccatccgggatgaaacccacaaacctattgccggacaaatcaatccactgaagtgttgggaacgagaacatccaatccggtagctgaccagagagctggttaccagccagtgataagaacctcaagctctgccatttggccacagctccactgagctcccctgtgatcttgtttcctgacaagttcaccacctccagagatcggcacccggccaacggcagcggaatttcaccagatattcggttgttcgacaaatctaacaccttcaaactgtcaagggcatcaagctccggccgcagtgctcctgaaagatgattccccccaagccgcaggtacagaagctggaagcagccggcaaggccagcaggcactacaccagagagcctattacgcgacaaatcaagcgcctgcaagtaggttaaattcccaatcccagtcggaatctccccggagagctggttatccgcaagaaacaatccctgaaggctccggatggcggtgatcccgacggggatctcgccggagaagcgattgtgggagaggtcgaggaggaggaggcccgaagcgtcggggtcggcgacgacccgcggcgggacggcgcccgtgagcgcgttccgcgagaggtcgagcgcggcgaggctcgccgggaaggagaggcgcggggagagcgggaagcgaagcgcgttggcggagaggttgagggcgcggagagccgggagcgaggccgggaagcaggtcgggacggccccggagagcgcgttgcgggagaggtcgaggtcgaggagcgagcgcggcagggagcacggcagctcgcccgagagcgcgttggccgagaggtcgagcgcgcggacgcggcggagcagcgcgagcggcgccgccgggagctgccccgacaggttgagcccccgcagcgcgagcccggagacggagggcggcggggccggggcgggggcgccggcggcggccggcgggtggagcgaaacgccgcgccaggactccgagagcgggccgcgccacgacgcgagcgccgcgcgggagggcggcgggagggacgcgcggaaggccagcagcgccgcgcggtccgtggccgcgggcgcggcggggcgcggcgcgagggcgagggcaaggaggaggagggaggcgaggtggtggaggggagaggcgttcggcatgggggggagttggctgggctgggctagggtttgggcggcgcggcgccggcgtggagcggaagcagcgcaggtggtgcaggagaggagcagcagcgggggcgtgtgggcggtggtggcttccgtggggtttatttttgggggaaaggtggcgacggcggaggaatttgggggtggggttttacgagccgggggaagcgcgcacacgtgacagcggcacggctggttcgcactcgggcgtgggatgcactgtagtctgtacgtgtaggggggcgccttccggcgaatgtcagatggcacgaaaaactttttaatggtacggactacggagggcatttcactggtacaatcgtgaatccgtcgggccatctataatatgagccactcctcgtggggaaactcagcttacaatggaggataactgtggatgggctactcaaaatctgaagcaactcaatagagacactccaacccatagtgggtatgcagccacaaaaccccatatatatttttactaccctacccctaatctctctctccagacccttcttttctttttttcaccgccgcacgggtctctccctctcgccgctgccgccgctcgcctctctcgttgccggcggctgcgaggacgacgaggagggccgcctctcccatcgccggcatccaccgccatccctctctccctctttcccgtcatcggttaggggcgccagatccggcgccgtagtgggcggatctgggccccccgcggctagatcggggaggatacgatggcgggcatggcgccggcggtgacgggcaaggcgccggcggaggaggccgagcaaggcgcgcagtggccggatctcgtcgctgtcgtccccaagcatgacgaccacaaccacgacgtcgtcctcgtgctgcttggccgtgagcacgggcgcctcaagcccgtcgacggcgccgagctcgacctccgcctcctccctcgctcctcagcccgtcgacggcaccgagcgcgacctccgccgcctactcccgttcctcgccaccgctcctgctgcagcctcctcccgctcctcgccgctactcctgccgggtggttgctgtggcggcgaagggcccgagagaggggaacgggcgagagagagaaagagagagagaggagaggggtggaaggggaatctgtcgctggagacatggtggccacaggagcccgtcgctgcaatgcgtcgctcgcctttgtcccctggccgaaaagtagcgagaggcgcgtcccctagccagggcgcgcacggactcacgaggggatgacgcggatggaaagattgacggatggtgctaggggcacgacctaggggcacccgttgtagatggcctcatactactggatacttcctccgttataggggtgggtagaaaaagaccgagatcgataaatgcggtcatcaatttggtcctaggcagggaaataccaaattttgttcagtcaattgttagtctcctcggttaaatgaatagaccgaattaacaaaaaaaatgtctaaatacaacctacaatccactatgttcaataggattaaactctaattttcacgttcctacttcttctaggcatgcaatctaacaagagtctttactcataagcgcttatgatttttttatttttgtgttgaaaatttccattatttctttgcatatatgaaaatgatattgaatttcggtcaggaccgagaccaagacaaaaagactgagaccgaatttgttggtcctgatatttttgcgttgaaatttggtcttcacttttcaaagaccgaaagaccgagaccgaaattttcggtcagaccgaatacccacccttactccgtggtgttggaattggatcgtgccattgcaaattattaatttgaacaaatattactacaattcgcgatatcagctagataccattgaattttttttgcaaaattgaaactgtatcgtcgttgtcagggttatggataccacatacttaatagtagtcgactaaatctcggcaggacccaccacatatcatatcttatacggaaacaaccttaggatataggaggagttccgcataaggaaggatgaatagagttctacatgaaaacgacaaggactactcggattgtatccatattggtctctgtcggtgatatgggaccgggagtatcgtgaccagaggcttgaggcagacacaatcgcccacgtggcctggcaccttcggggacgtcgggcccgagggtgaggtgtccgccctcctcctgatttccccgagggggggtcgggtgactcctgccccggccccgagggccgaggcgccccgaccccttgtggagttagcgccacatgaatgggttgggtgaacacggtaagcctcacctaaccacatttattgcggtctggtcgaacgtgtcacgctgcatgcagcgtagtgcagcgcgttcctttatccggtctgtgaccagtcacagaccggtcagatcacgggttaggtggcgactggcggtctgacgcacgccttgccccatcccgtcaagacgaaagcctctaggcactcgtctcaagccggagctagcgtgtaatctcttagagatggcacgttagccctggttagatttataccaggcttcatcccaaccattacaggcaagatgctacatgaagaagggcaaacatgcacgttgctaagctgacacgtggtggacaaggatgactgatttgtgaccggtctgacactggtcgcgtcatcaacagacagccataatcccacgtcgcacctgtttccggcggaagtgggggtagatatgggccgtcccgtcagaagggcacccggagagcaaccgtaccgatctccgtccatttatgaagagaagaacagtccagtttggagagggagaggggcatgtggtatccccttgagatataaaaggaggaccttgcccacttagataaaaagaggacttttggacacaaggccttggccagatccgatcccagagcgattgggggctggttgacactttgttacttgttcatacacaaatccaccaaaacacaggagtagggtattacgcttcccagcggcccgaacctgtatacatcgcccgtgtctcgcgtttcttcctagctggcgatctttccacataccgagagagcttgagatttcaccctaagcccccggccgaaccggcaaaggggggcctgtgcggtctcccggtgaggagccacgagctccgtcatctggcgcgccaggtagggggctcagcgtgtgttttctgagctctcgtactcctccgtgtgcgccaagtttttcttgttcagcctaatggccgagcaagcaaaggtgcacgacctctctccgagtgtgagcggcgacgacggggagccaaacccacgccgtcgagctcgtactcccccaccccctccacaccaaaatcctaagcagggggaggcgctcgagagggtcgaaaaatccgcagcatcgccagtcgtgggtgatgcaggagaacggcgagatggggagcgtcgcctcctcgtctacggcgacggcagcacgcctcagggcgcgcttcaggctgttggcgcgctcctacgtcacccgcccgtcgtccctgacccggagtctccagcccagcgatggctggacgacgtggccaacttggtcatgacggcacagcagcgcctgggtgctggtggacggtccgccaccaccaagacctccggcgccgccactaccggctccgtgtcgtcaagacggagggcgcggcgagcggcggctgttgcacgccattcggctgtcactccctcgtcagcacctccgactcgggaggatcagcatggagagccggatgcccgcctcgacatcgagcgccggcgtaatagccggcgtactccccgcgcaacggagggcgcctcttcgtccagagtgtcacctcgacatggacgtgaggaccagccctccgtgcccccggctggtggtgtcggctgtagagcctttgtggcgagtcttcggaatgtccgttggcccccaaggttccggcccaccatcaccgagaagtatgatgggagtgtcaaccccactgagtttctccaggtctatacgaccgggattgaggccgctgggggtgacgacagagtcatggcgaatttctttcccatggccctgaagggacaggcgcggggttggctaatgaacctgccacctgcgtcggtccactcttgggaggatttatgccaacagttcactatgaactttcaaggcacttatccgcgcccaggcgaagaagcggacttgcacgcggtacagcgaggggatgatgagtcacttcgctcgtacattcagcggttttgccaagtccgcaataccataccatgcatccctgcacacgcggtgatctacgcgttcagggggggtgtgcggcacaaccgcatgctcgaaaagatcgcgtccaaagagccccagactaccgcggagctttttcagctcgcagaccgagtggctcgtaaggaggaagcatggacctggaacccctccggttccggagtggcagcttcggccgcccccggatccgccgctcagacagggcggcgtgacaggaggaggaagaagaggtcggtctattccgacgacgagggtcatgtcctcgccgtcgagggcgctccgcgggccacccgaaaggggaggcctgcgagcgacaaaaagaaagaggctggtactcccaccagggagcgcccagccggcaagtggtgctccgtccacaacacctccctccacgatctcgcggactgtcgcgcggtcaaaaacttggctgagcgaacgaggaagtgggaggaggacaggaggaaggaacgccgtgagggcaagtcgccggcaactccctccggtaaacggcgaagtgaggccaaacaaaaggcccccgctgttgacatcgatgacggtgatgatgacctaggtttccaagaacctggggccaccattgccactgtcgatgggggagcgtgtgctcacgtctctcgccggagcctcaaggccatgaagcgagagcttctggccgcggcccctactcatgaggcgacgcgccgggcgcggtggtcggaggttgccctcactttcgaccagaccgaccacccaccgtgcgtcgcccggggagggcagattgtgatggtggtttcccccaccatctgcaacgtgaagttggggcgtgtcctcatagatgggggagcggccctcaacatcatttcccccgcggcttttgatgccatcaaggccccggggatggtgctccagccgtcccaaccgattatcggtgtgacgccggggcacacatggccgttgggtcacatcgacctaccggtcacctttggtggatcagccaacttccgcacggagcgggtgaacttcgatgtggcggacctcagtctgccctacaacgcggtcctggggaggcccgcgttggtgaagttcatggcggcggtccactacgcctacctccagatgaagatgccgggccccggtggccccatctctgtccatggcgacctgaaagtcgcgctcgcttgcatggagcagcgcgcggaccacctcgctgctgcgtccaagcccgagggtggtgacgagaggcttggcaccaccgcccccaccgccccgaggcagcggattgtcacatgcgccgaggtcccggtcaaggaggttgccctgggcgacggcccatccaagaccacacggatcggtggtcttctggatggcaaataggaagacgcgctcgtctccttcctgcgggcaaacgctgacgtcttcgcgtggagaccggcggatatgcccggggtccccagggaggtgattgagcaccgtctcgccgtgcggccgggcgcaaggccggtccggcagaaagtgcggcggcaggccccggaacgtcaagccttcatccgcgaggaggtggcaagacttctggaggccggattcatccgtgaagtcatccatccggagtggctggcgaacccggtggtcgttccaaaggcgaacggcaagcttcggatgtgcatcgactacaccgaccttaacaaggcatgtcctaaggacccttaccccctgcctcgcatagatcagattgtcgactccaccgcggggtgcgaccttttgtgttttctagatgcatactctggttaccatcagattcgcatggctagggaggatgaggaaaaaactgcgttcattacccccgtaggaacctattgttatacatcaatgcccttcgggttaaagaatgcaggtcctacttttcaacgtactactcgcatttctttgggtagccaaatagggcgtaatgttgaggcttatgtcgatgacttggttgtaaagacgcgcaaccaagagactttactctcagatctagcggaaacttttgaaaatctccgctccgcccgcataaaactgaaccccgataagtgcgtgtttggtgtacctgcgggcaagcttctcgggttcttggtctctgcccgaggcatcgaggccaaccccgagaagatacgagctatagagcggatgcgcccccccagcaaacttagggatgtgcaatgcgtcaccggttgcattgccgccttaagtcgtttcatatcgaggctgggagagaaggcgctacccttatttaagctcctcaagcgctcggggccgtttacttggacggaggaagctgaacgtgccctcactcagttgaagacatatctcagctctcccccagttctagtcgccccggggccaaataagcccctactactctacttagcggcgaccccccaagtagttagtgcagcgttggttgcggagcgcgatgaagacaatcctcatttcgcgcacccccgccctgtgctgacttggcccgggagcgagcagggaggagaagcccccgagtcaaacggtggcctaaggcccctgacgaccggagtcggccctctgcccgcttgtcagacggtgctgggtgcccccgaccctcaggaaggccccgaggccactgcgggaaggccgcacctatcgccctttggccccgaggttaaccctgtgctgactcgacccgggagaaagcagggagaagaggcccccgagccgaacggaggcctgaggcccctgacgaccggagtaggccctttgcccgcttgtctgacgacgccaggagcccccgacccccaggacggccccgaggccactgtgggaaggccgctcctgtcatcctccgaccccgaggtcatcggcacagaagacgagtgcgccccgagaggccacttggacgaagaacgccccggggatgcggcccctagcgaagaggatcggccccgccgaaaggtgcagcggcctatctactttgttagtgaggccctccgggacgccaagacccgataccctcaggcccagaagatgctttacgctattctgatggcctcgaggaaactgcgccattatttccaggcgcatcgggtcactgtggttacgtcttaccccctcggtcaaatcttgcataatcgagagggtacaggacgagtggtaaaatgggcaatcgagctttctgagttcgatctacactttgaaccacgccacgctatcaagagccaggccctcgccgattttgtggcagagtggaccccggctccagagaccgtctcaatccccgaggccagcacggacccctctcagctgcctcacaccgcccactgggtgatgcagttcgacggttctctgtctctccagggcgccggtgcgggggtcatgttgacctctccgaacggagacgtcctcagatacttagtccgtctcgactttcgagcgactaataatatggcagagtacgagggactccttgccggactcagagtggcagctggactggggatccgccgcctcttggtgttaggcgactcccagctggtcgttaaccaggtctgtaaggagtaccggtgctctgacccacagatggacgcttacgtacgccaagtgcggcgtatggagcgccattttgacgggatagagcttcggcatgtacccagacgggataacatggttgccgacgaactctcacggctcgcgtcctcgcgagcccagaccccaccgggcgcctttgaagaaaggcttacccagccgtcggcgcgacccgaccccttaggggagacggatgcgcctgaccggcccccgaggcccgtcggagtccaggcctcgggacccgaagggagcgctccaagctcccttagattgattgcttggatctctgagatccaagcatacctcgcagataagactctacctgaggaccgtgaagggagtgaacgcgtccaacgcatttccaaacgctacgtgctggtagaagggaccctctatcggcgcgcggctaacggaatcctcctgaagtgcattcctcaggaacaaggcgttgagcttcttgccgacatccatgaaggcgagtgcggagcccattccgcctcgcgcaccttggttggcaaggcctttcgtcaagggttctattggccgacagctctcaatgatgcagttgatctggtccggcgatgcagagcgtgtcagtttcacgccaagcaaatccatcagccggcccaggccctgcagatcataccactttcgtggccatttgctgtctgggggctcgatatcctgggaccgtttaagcgggccccgggcgggtttgagtacctgtatgtcgcgatcgacaagttcactaagtggcccgaggcttatccggtcgtcaagatcgataagcactctgcacttaaattcattaagggcatcacggcccgttttggagtgcctaaccgtattattacggataatggcacccaattcactagtgaactcttcggcgactactgcgaagacatgggcatcaagctctgcttcgcctcacctgcccaccccagaagcaatggccaagtggagcgcgccaatgcagaaatcctcaaaggccttaaaaccaagaccttcaatattctcaagaagcatggcgattcgtggatcgaggagttgccagcggtgctctgggcaaaccgaaccacaccaagccgagcaaccggggaaacgcctttcttcctcgtctacggcgcagaagcggttctcccatccgagctcaccctgaggtctcctcgggccaccatgtactgcgaagctgatcaagatcagcttcgcagagatgacctcgactacttggaagagcgaaggaggcgcgcggccctccgagccgcgcgctaccagcagagcctgcggcgctaccatcagcgccacgtccgggcccgatcactctgcgtcgacgacctcgtcttacgccgcgtccaaacgcgtgctggattgagcaagctctcaccaatgtgggagggtccgtatcgagtgatcggtgtcccccggccgggctccatacggctggccacgggcgacggcacggagctgcctaacccgtggaatatcgaacaccttcgtcgcttctacccctgaggggggggtcgagtgtcaggttttggctcgggccaaccccgtacccccctcgggtgtgcagggttagccggggggctaccacgcatgcacattcttatttctcttatttcagcatttcaataaaagcagtttcaatttcctaaaggttgtgtctgtgccgttttttccttttgaagaatcttgacttgaaataaggtcactcgtactcaaccttgccctcgggggctcggttcggtcagctaaaatcgccaaacggggcccagaaccgagccgtgccccggggcgtggtgaacttcgggggggaatcggcaaaaacccacaatcgggtcacccataaccctcggtcaccacattcccggcctggccagcctcgacatgtggatctccccaggcactagccccgacccgagccattagaggactgggacttgggcacgagcccttaaatcaagctaagacacaaaagaggaccacggcacagatcatcctcatctcatacgcatagcaaaataaaattgacacgaattttttcatcatttttgattgcagattaagttggtctatacaaaaaagaggcatgaaggccttaaaaaaaaaaaaaaaaaactggagtctggcgggggcctgggggctcagtccgatgcgcccgggtcgccggcctcgtcgtcacggtcgtctgcaccgctggcgtcgccctcctcgtcggagttgggggcgaacgcgagccgaggggccgacccctcgaaactgtggacgatgtggtcggcggcatcccggacccgcgcgcgcgcgtcgtcctcggtcccgggagggaactcttccagcgccatccatggagagaagttggggtccctggcctggtaactcgctagtacgagttcaaccgctccttgggcgaggtccctcgaggatgacttgatggtcttctcgagctcctcggggagttgttggagagcccaggccatcttcgtgaggtgcggagcgaggccttccaggttggtggggtgtgtcattgactggcctttccagaggcccgcttgccgaccggcgcgatccaggcgggagaccgcatcccaaagcatgccgggccctatttcgcccgccaagcggagggcctcggcttccccggcggatgagtctagcgcgcactgcatgtcggcgacggtgagttcggcagctgcgaggcgggcggctaagtcgctttcgcccgcagccgccccgctgatacgcgccctcgcgtccagctccttttcccgcacctcgaggtcggcagcccgctgctccagtgcggctctctcggcgcggacggattccaaattgcggcgtgcctgctccgccagcgctgcctcacggaggaaaaggctatccgccaaccgttgcgccgcggcctcggcctcttcgagagctcgctcccgctcagcgagtgcgtcctcgcggaggcggagcgcggactcctcttcggcgcaggcggcctcgtgcaccgccagcgttgtctcccggatagcggcggcggcctcgcggtccgccaagcccctctccacggcgccggcgtgttcctccaatgccatagcacgggcctcaagggcctcctcgcgccgccgggacgccgcttcgatctccgttgcccgccgctctcgggcagcggcggtgtcaaggaccccttgggcggcgtcgagctttttctttagctccgcctcccagctcccgtgttgaaggcggagggtgtcctgcgcctcgatcatcgcggtggtggcaatgagggcggcctcccgctcctcctccacctctcgggcgatctctgccagcgccgctttgcgggcttcaagctccgagacgtgacggcggtgagccttgcggcccacctccaccatgacatccaccgagcgccgcccctcctcgacacgcgcccatgcggcctcgagctccgctcgttccgctcgcagggcctccacttgggcgctgaacccatctagcaccgcggtgtttgcggcggccaaggcctgcagaaggggctcggcgctcagcggggcgacagaagacgaggagaatagccgccttggagagaatgcgacgcggctcggcccgccggaggacgcactgggctcggggatgtcccccggacccgattggtcctggacgtcgcctggggaagtgggcccaggcgatccgcccgcagcctcgtcgcgagccgccccggaggctgtcgcctgagcgtcgcccgagggagtaggcccaagcgacgcgccagcagctttgtcgtgagctgcctcggaagacgccatcgcctcagcctgacgagcccgggcggcctcctccttagcagcttcttcggcttggcgagcccgggcgacctcctcccgagcggtatcctctgcatggcgagcccgagcggcctcccgggcggcctcttcagcttcccgaaggcgatctgcggcctctcgccggtcagattctcgcctccgttcctctgcggccgccggatcttcggcctcggattggccggacttgggatggcgggaggaacgtgacgggacatcgctgaagcaaaagaaaaaaccagaagacaaacaagatgggtaagagaaaacttgcttttgggataaaagaaagacggtcgcaaagagagtgggacgaacctgcgagggggtcggttaaatgaccaccttggaggggaaatcaggtttccccaggatggttccgtctcccccatcttgcggagccgcttcttcttgcgctccccctcgggctgcgatgtcggcgcggccccctccgggtgccgactgctggcacgcaccgccccgccccctcggggaggagatgggggaggtgttcctcccagcttcctcttcccctgggcgtcggcagggcggctgctccccgagcccccgacgcggggcccagaagcacgaccccctcctggggtagattgttccccccggcggctctcgcccgcgccgtcgtggcccttaggagtttcctcctctgaggccccgacccccatcataatggtcagaatggaggcgcggtcgggatcgctgcagagggggaggattccttgagggatgagagacgcctccacggagctgagattcagcaccctttggaccacgatcttgaagtcctcgggagcccaatcccatctgactccctggtgggtccgcatgtagtcttcggacccggtgtactcccaggcgccccgggcgcgccgttggagcggcgcaatccggcgacggaggtagtcgccgtacaccatggcccctgtgagcccctgggatcgcaggcccgccaggcggtcgaggacggcgtcatagtcatcccccagatctaccggcgcccgccagctggagacctgcgccgggggctgacttggaagtcggaggcgcgcttcgttggcgaggggggtgtagaaccagtcgctcttccagtcgtcccacttcttgcggagggcgcaggggatgtagcggttcaacaccggcccccgcggctggaagtagcagccaccaaccaccgacggcggcgacaccgactgcacggtgaagaaccaccggaacagccgaagagatgggcgcaccccaatgaacatctcgcacaggtgcgcgaagatggccaatgtcatcactgcattgggggtgaggtgcgccatctggagatcgtagaaatccagaacatccataaagaaagaagaaaatggcggaaccagccctgccattgcgaaggggaggaagaaaacggaccgccccgggtagtctggtgccgggcgtccctcgcccagcatcactatctcccggccggtggcagattccggcataaagcggcgcggcagcccggcgtgcctctcgctcacgatgcgagaaggcggaagtacgcttccgtcgagcagagcggaaccccgtgccatggcgccggaggaagggatgattgagaacgagcgcgtgtggcgaaggaaaggcgcagcagagaaagagttagagctcaagcagcgaaggcaaggggaatagtggcgaaaggaagggagcaaatcctttcctcggtgtctttatacctttgccatcgctgtgcccggctcctcgtttctcgcgcccactatctcgctccctcgtttcttactatcccgctccctcgtttctcgtgcccacgcttccactaatcccattcgcccgcttgcggcgcatgaggtagatatgcggttgtggcagtcgagatagatcgtatcgtgcgcgcgttaattacgctcgccgaccgaagcaacgttaccatatctccaggcgaagcaaatcggctcacccagattcgtacgtcgctcaagtaatgtggcagtcttgaagagaccgcccattatggacagccaagtcaccattaccgatgtgcatgatttgagaccgttgggtttctgcccaaccatggagaccggtcccacctgtcaccaagctttaggagtggcgtcacgcccgaccgcttcccttgagaagggcgatcgccctggcataacgccgggggctactgtcggtgatatgggaccgggagtatcgtgaccagaggcttgaggcagacacaatcgcccacgtggcctggcaccttcggggacgtcgggcccgagggtgaggtgtccgccctcctcctgatttccccgagggggggtcgggtgactcctgccccggccccgagggccgaggcgccccgaccccttgtggagttagcgccacatgaatgggttgggtgaacacggtaagcctcacctaaccacatttattgcggtctggtcgaacgtgtcacgctgcatgcagcgtagtgcagcgcgttcctttatccggtctgtgaccagtcacagaccggtcagatcacgggttaggtggcgactggcggtctgacgcacgccttgccccatcccgtcaagacgaaagcctctaggcactcgtctcaagccggagctagcgtgtaatctcttagagatggcacgttagccctggttagatttataccaggcttcatcccaaccattacaggcaagatgctacatgaagaagggcaaacatgcacgttgctaagctgacacgtggtggacaaggatgactgatttgtgaccggtctgacactggtcgcgtcatcaacagacagccataatcccacgtcgcacctgtttccggcggaagtgggggtagatatgggccgtcccgtcagaagggcacccggagagcaaccgtaccgatctccgtccatttatgaagagaagaacagtccagtttggagagggagaggggcatgtggtatccccttgagatataaaaggaggaccttgcccacttagataaaaagaggacttttggacacaagcccttggccagatccgatcccagagcgattgggggctggttgacactttgttacttgttcatacacaaatccaccaaaacacaagagtagggtattacgcttcccagcggcccgaacctgtatacatcgcccgtgtctcgcgtttcttcctagctggcgatctttccacataccgagagagcttgagatttcaccctaagcccccggccgaaccggcaaaggggggcctgtgcggtctcccggtgaggagccacgagctccgtcagtctccctagttctacttggacaaggggacatctatgggtataaatacaagaccccctagaaggagggaggacacggaacaatagatcaaggcacaagatcaacatacaagccaatatacgccaagacacgccgccggatattgacttcagaaataagcatggctagtcccctacggtgtctatggatactgtcaggagagacatagcgctgtctttgatctcgccggatacggattcaaggaggaaggctaccctgttgtcgactacgagtcagcacttcagaccgccaagtcgacaacagttagataggctaccccaaatattgtactggtgtgattatggtgaataagagcaacgaccggcttcggccaataggagtagggttattacctgacaatttaggggcccgaacctgtataaaaatcctcgtctccatcttttttactacaatctcgtatatattctagtatcaacgatccccatactatgtaaataccggaatcgcgacatcaaacatccacagtcgtcgtcagatttttcatgttcttcccatcagggggtcatccacgagaaaggcaaccagctagctccggtgaagaaccctccctccctcccccttcgcatcgacaaaaaggaggcagctagcgagcatcctcccctatccgagatcattgccggagccagaaaggccatatccctggtgcttcctccctcccccatcaccatacccttggcatggagctcggctcgctggatccaccggcctatgattcatgctatcctggaccttgccggtcccaccgcctccgaataaggtaggaacccgttcccggactgcattgcctcggcccgcttgaggatcagacgatgaccatgctcgatgtgtggtgccgcagtccaccatgatccgaacatcgacaccgctaatgtgtcccagagctcgctaatgaggagaataagggaaaaaaagaaggaataagatgaaaaatttgatgacgattgcatggttttaattttgcaaaaatttaaatggcacctaaccgatatcgtgaacagtagtgtcatttttttcaaattggtaaatttggaatggcatgatccaattaacaattttttaatatatgacttttgtacatacatttgattatccatctttttttatttgatttgttattaatattttttttaatcataacatatactttttatgtttgcagaaaaattttgaataagacaaatgatacaaacatttatcaaaatgtccacgacatcatatattgaaaactagaggtattatattataatattagcgtataaattgtgaaataaacgacatgtgtattcagtttttaacgcttcagtcctccagttgtgtctccctcatttctattgaaactataaattattcccttaaaagagaggccttatatttcgtaaatactctctatagtgcattttttagactttcaagtactttgtttgtgattggtaaaagcaaacatactttgtctataccaacatgataaaatagtgtatgatgaataactagtcaacaatgcttcattgattaggggtctgttctgttttccatgtcctttaagtaaggggaaaatgaacatttgaagagcacaagatgacaagaactgttgcgttcgaaaagtatgttttttctctactaatcggttggattatggatacgatgatttacttctaggacgagggagcctcgtccaaaataggctaggagggcagatatagatcataaaagggcattagggttgaaatgcacttgatagtgcagtgactaagaacgtgtgattttaaccctaaggccctttacttaaattcctagcatgctcacaatttaccgaagataccaccggtatatcattccaatggaatagctgatgtcatgattatgttagcataatatctaggtacaccagatcctatacctatcggatcatgctaacgtcggtatagtacctggtaccatatctgatgcatatagagtatcgtgctaacgacagctattccgttgtaatggtatgctgttatatagtctacctctttttattttgtcacttaagtttaaggcttgattagaattttagacagggcctccaaatttcagaggacggcccagtacgaggcaatactggactcctagcctcctggctagtgatgtgggcttaaaagagctgatcccagatgggcccttttattttaagcccacgacagcctttgatctcgtgtgttcttttccccacgttagtgaatcaatcaaccttgccaagtgccaactaacctactcctatagttgattccgtgaaatccctgccagtggtatagtcgtacatggtcctgttataattaatgccacttttcacgatcctcagttccttattatagtgcttatctatatgcatgtgcagaatagaatcatagattagccaatttgcagtacctttttttccctttgagagtaccaacttgtagttatacaccaatatacttaaccacacagcgaacagtaacacctccaaatctcaattaacaaaacagaggaaaagatcgaagtgtagtaatctccagacatgagtgaggtagtacaagcaacgtactaccagtctaccaccaccagtaacagcaagcctcgcagccaatcgatgaccggtaaaccgcatcaggttcgcgtggtagtacaagtgcagaatcgtgtgtggaggtactacgcgccccccgcgcgcgcgacggcgcgagcgacgcggatttctttaagtttttccgcacggtgttacatgggtttgcgtctccgctaatcgagcgcctcgcgcgcacacgcgcgacggttggttggttggttcggtttgtttaagattttggttgatttcatcgagcgatcccgcgagcgtagacgtgactgcgcagccgccgcgcgggggtttttttatgcagttgagtgaatgcgcgcgtggtcctctttctctctctcggctccgagtctcgtgacccccgctgctggagtcgtcggccgtcgtcgtcgacgctgattcggtgattctcgtcccaccaaccgggtttttctatagggtgggtttacactttacagattaggtcgctttccacgtcggccgtggccggtcgccggcgtgacagccttagcttacggcggcgacggcagcggcagcggtgttgtgtagcgcctgccttcgtacaaggatggtagggtatcaacaatgcagtcaaacttttttcttgtaaactaaaccggtaaaaaaatttgttaattatatttttgataagtaggagaaaaacgtatatggttatatggtagttttagaagtgacatggtaataacacatagccgttatatgtagaccgaggtcacacattttctccatagcgctagtggcttcaattgttatctttgtttttctatgtcagtttatgatattttctattacaatcatgttttacttaatttacaaataagttcaaagtattgcactaaacaccaccaaatctagaaattacaaaaaaatccccttgcactctctctccctcaatgtctctccctctacgccaataagctcgatccccacgggtgtggataaagagctctccagctgacactgcctctcctctatttttcagcatatatcaaaggcatctctctttttgaccgacgagatctttagctaagtcatcgttttctttctccaaagcaaaacaaaggcggatccactttgccaaaggatccactgggtgatctcaagactagggccaatgaggtcattgacagctagattcatagatcaggcgatgggtagcaggttgggagtggcccataaacaaggagagatggtagagcaagctgatgagctctacaatgatgggattgttgtggctgagggatgagatgagcatgggactaaatctacatcgacaaagcatcatacaaataggcctctcgatcttcttctcctccactgcgcttgttttcacttcctaaccccatcattagcctctcttttttttggtcgagctagcgaacactagccgaaatttattaagaaagtgcaagaaatttacatgctacaaccaacggcaagtcggtctccttctttcattggccatcacccgttggagctccgcgctcggagaggaggtggactgcaccgcattgctagagcatggcctcgccgaccatggcttgcgaaccatgcctccacgctcgagtacccttgccctgacgaggcgtgtgtcttttgtagggcacgactaaggctaaggtttaaggcccccatcctttggccaaatacatataatacgccattcggcgtattagcaaaataataataatttacagataagactttcatatatgtgtttttagcgacttaaataccaatgctggaaaataaacttcgatgaaaaactttaaaatttcaaattttggtagcggctaatgctgattgaaggaaacgatggggacctaagagcatctccagcaatagaccttattttgaagcgtctaaaagttaaatgagggctgcccccatttctcaaggactaaaaaatgcctccaactccagcagtagcccctatttcttagtccctactcatgtttatcttgtattttaaaatacaatccatatacagtatgtttaacaccacaaaaattcgaacacaattatttctaactcacataatttaaccatacttaaattcacaatttcaaacactacaattcgaatacaaaattaaaatttttaaacatgtaaatatggtatgggtacagtgccatatacgacaacaagatgcaaccaagattcgtaattcaccaatgaaaatgaaaattgctcataaaaaatacactatgtgaacccaatgatgcattatataatttaaaaataatacatcctacaaccatgaatgattcgattataaataacaaatctgaaagtaatatatgtcctactagcaagtgacactaaaattattgtggaaataattaacaaaaaaggactccaaagaccaatcgtgataatggcatatcctactagtaaaggacacatggatcatccaatagaatccaacttattccatcgaagtgctcaaacttctccattaccgccaccaaactcacctccaaagccactactaccatcaaatccaccattgagggcagccacctttgaagctgcaatctgtgccctcatagccaacacatacgttctcacatccggttccaaggtggaaacatcacaaaacataatcttctgttcttgatcccacactaacttacgctcagcaaataagagcttgcgctcttgaatctccttagtttccttccatctctcttctttcaatttcgcttctttctctttagcgtcaagcaaatctttcatcgcctctttgtatggtccatcttgtcctccattcttcaacttttcctttgcttgcttcctacctattggtctctttttagcactcggctgagataaatcaggagctgtactcttgctagcatcatctccttcatcttcttcaccagctctctcaattggggtcgaagacttcctagaccgtggcctcttgtgggattctagtgtttgaaactttggagaattcctcaacttgagccaacaatgattaaactgaaatgccctattctttggtgcagtggacgagtataatgcctcagcttcaagaacctgcaacataatttaagttttaattcacatacatacaagattgttattaataataataaataaacaatttaacttacaagctcttgatgtggtatgccacttggatgacgacgctcaatttgattgtagcaaccttgaaacttgcttacttccttctgaatgttaccccaatggtgctcaagagagtttgcattcctatcagactcaaaatcacggttagcatggtagtgctctgcgatcctctgccaatatgccttccctggttgctcattgccaataataggatctgagctaatgctctgccatgaaatgcacaattgaatgtcctccttatgagtatagttgcttgatcttttggcacttccttttgcaccatttgttgaagtacgaaggtcttcatttggcattagcacttcgacatcagtgtcctcggacatcatgcgcacaaaggaatcacctccacttgtcattgcaatctagtcactgcaataaatatataaattgacaacctttccaatctatctcagaaacatcaacaagtgattgcaatgtacatcaggttatactgtttgcaatatgtatttatttagcatatatattggttgcgcagtactaaggactcagtgcaaacacaaatttatttcttaaatattatatatgctctgcaagattagctctctgacatagaacaagacactgcatataaaacatgaatgatgacaatgtacgttttgctgtgcgaatgatttagatgggcctagacgcctagtaagcccataaagatcaaaatcaaacaaggagactcagacatacgaaactgaactttactattgtgatttgttttaatcaccatcatctctgaatttttttactgcagcatgtgtgcggccggtgatagatagctgtcgatggtcggcgctaggccttgtggacagcgggtgggcagctagttcggggaggacgtcgagactcacctgggcatgatcaatcggtgacgacgtgcgttggccgaagatgcaaggaggtcggcgacagtgagtgacggagtaaaaccgatgattgtgatggcttgaggcggcacaccatgggatctcgccgaagtttcttcccgagggatgtcgggtggtcgccgaccggagcaaaacgacctggcggcttgctcgctgggaggttgtgggaggatggcgatgacgcgggagggaggatgacgatggcgcgcgctcagaaatttcccccgccaaaaaaaaagaggatgggggctgtggggttgagccccccggactgggggcttggaggagtgatctaggggcctccctagattgggggctctagtagggaatctgctggacctatatttttttgcatcaactctcaaaacttatttagggactttgtttgaggaccctgttggagatgctctaagtaattaagaattttctttggttttattaaaattaagctggttactatagttggtgttaaaactttttattggacagcgacgtacgtcgtgaggggattaaagaatcgggcaagttggccgaaagccaacgtggttcgtgtgggcgctaccgcggtagcgagcgagaggtgcatgcacctgtcagaaaacggatgcaccacccagggaacggacatcttgttttttcttttttctttccggaatccggcggagaggaacgcctgtgcaatccatgaaaaccgcggctggctttgggggggctttagctacggaacaaaattttcgagatgttgcgcctacgcctcccgtacaggctacagccctgctgcagtgctgcgtcgtgacctgacgtgtctgtctagctgtctcgtggtactagtacgaaatttactgacacaacgcactagtgcatttcccagctgttgaatttcacctaccattggagtgaccctgtttaaatggtagttaaaagtcttttaagtccctattacatcagatgtttgaaaattaattataaatattaaacgtagactattaataaaactcattcataatcttagactaattcacgagacaaatcttttgagcctaattaatccataattagcctatatgatgctacaataaacattctctaattatagattaattaggcttaaaaaatttgtctcgcaaattagctttcatttatataattagttttgtaagtagtctatatttaatattctaaattagtgtctaaatacaaagactaaagttaagtctctgtatccaaacaccacctaattcgtactctaatattctcaaatgtactgctactactactacaatactgcatggatccaaatactcttataaacagttaacagatcgatattgtaaactacgagtaaaaagtattccctccgtactcgttttggacagcgacacggtctccaaaacataattttgacttcttgtttctataaaaatatatattaaaaagtgatatatgtatacttttatgaaaatatttttcaagaaaaatctattcatataatttttacattttcaaactcaacaacttgagagttattcatgatttatattcccaatgtttgacttaaatattgtcctaaacgacttccattatgagtacagaggaagtacaatttacccccgaactattatggtacggtagtacaatttaccctctaaactataataacatatattgtattcaatacctcaaaactcttaaaaccagacgaataccggggcactattttggacggttttaggctaggttagctgacttggcatttctaacgcggcaaaaaataacaggcccacttgtcagtgatccatatattctcacctcatctcttctacctccttccacctcgatctctctctcatccttgaaccgagcagtgaggagaaggccgcggtggcagcaaagactactccccgggttgcttgaggtggagcgtggtcggctagagaagcccagggcggtgacggtgcgcgacgatggccatgatgctaaaccgctcgttctcacggggggagcactgcgccgcctggagcacctcccgcgcgccgcggtaccgccctgtggccaccgaccgcgctcgtactctagcgccagcactgagccgttgccaccgctagagctgccgatcggattctattccagggcaacgacctcgacgttgggcccttgtcaccatcacatttgtcatcgcaagcctcaccgtcagtgccaccatctttctcgtgccgcgcagcacggtgacaacgacgatgtgtccctgttgccgtcgccgtcgcagagcgccgacttgcagagctccaacttgacatagtatccacccaggtcactgcacaggcgcacacgcagtccatgccgctatccctccttctcccgcctgcatgccagccccaagaacacggtgacgaaaatgaggccaacgtgcgtggccgactactgctaggctgaggccgacctgcggtcagagaggcgaggccgagaacgagcggccaatgctgtcgtcgccgttgaaggcaaagggcgcggccgacgcgctcgcgcgtagcctccacctcctggggtccatacttgtcgacgcccgcctcttgcgtagctccatctctccggcaacaccgccgtcgtgcccgacgcggacgcaccaccaacaccaacaccgcaccactccgccgttggccgcacgagcgtgcgcacgaggaagagagagtagggtgaccggggaggcgttagattgagggagaagtatgacaagtgggcccacggagtttttttaaaacttttttgctgactggactgacacgttggcatctcgtaggtaagctcaagtcaaaaccgctaagaacaatatttaggtggttattagtctagtataaataattgagagtgcaaaatgtctacgtgagccttcacgtatacacacaatgtatacaaactaacaaatattatttttttagaaaaatgtacatgtactttaaatagtatttatatatacgcgtgaagtcccatctttaaatttatcatatatatatatggagaaaaaaatctaagacttatattcataaagctattagaattttttttaagtatgaaatataatgaatttgaggataaaactttacgcatacgtataatagtattgaaagtatatgtataatatttttaaaacgttttagcgatatttagtatagttggtatgtacagtacggagtatggacatgaagtttggtcctgttcgagaacccaacaaagggcagattaagttctagattttcgtggcacgcttttcaaactgttaaacggtgcgtttcgtgtgaaaattttctatatgaaagttgttataaaatatcagattaatcttttttttaagtttgtaataattaaaatctaattaatcaaaagttattaccacctcgttttacgtaaaacatttgatcttcatatttatcttcagaagattcaaacagaacctttgtgtgcccaagatatgaacctcttaattaacaaatagatatagttgtatagctatagctgttgggcgcacagctttttcatccgtgaatggattacattgtagaagtaaaacttatttcgaaaactatactgtataagtattcgacactggctttaattagctgaaaggaaactttcatatgcccttttatggaccaacatgtcgcacggaccacatttggtataaatccactgaacacgtttgatcttttcccgcctacttagctggagccttatccattaatttcaaacagttagtaagtcctcaaatggactttgagagtcacgtgacaacaactagggttttttttttttggggggtgtccactcgatctttcatgcatattcacacctttcgccttttcttttgaaagatcacggttaatttagtgctatattaaagaaaagatgaatagtttaaaaagagagcaaattaatttaaaaaagatacgaatattagtgaagtacctaatatcaaataattagaagggataaggaccaaggtcatctaacccagccggaagacctctgggtgtttctctaaaaaagagcaaattaatattcagttgatttagaacaatcgggctaaaaccgccatacaacaataaatacactaactagcttttttttaataatggaatagataacatctcggcctttgctcaacagagctacagccaattattacaatctagcacttaacaaagagtgtagttcaaatagaattaaacacacacctaaacataaaaaaaatgaccagaccaatataaggagcacacaattatttaagtctatttgtgaatctccatccatagttggcaaaaagttgcataaccgtcgtctcaagcttacgacatataactttcaaaagctctccatcttcatcacacttttacggttgtgcccaaaaccggagccaatatgttgctctgaagaatgcctgcataaatgaaatagatagtgatttgtcaaaaatcatatcattcctactcaatcacagagcctaacatatagtacaagcttctacaagaattagtttgctccttttcttgttcacccccaaagccaaccatcaaacatacaatgtatgaaagtaggaaggtataaaccaaaagagtactgaaacgctccccaaacaaattttgcaaaatgacaatctataaaaagatattgaatagtctcatttttcatacataaacaacatcttaagctgccattccaattccgttttgccaaattgtctttgttaacataacccctttaagcaagtaccacataaaaatcttaattttaagcggcatcttaagtttctaaataatcttatttctctcaatgtaaccattattaattaaggcttaaggctagatacattgaccttacagaaaataaaccattttgatgataattccatctaaaatagtcagtagattgattcaactgaatatgtacaatagaagcacgcaattcatgccaatatacaagattctgaccaactaaaactcttctaaaagaaacattaagcggaacagatcccatggcattagcaatagataaatttttccttcgaactatataatataaagatggatatttatctttaaaagccatgttttctagccatgtatcctcccaaaacttcatttgttcctcattattcacaataaaaaaactcatattttaaaaaatatttttaactttcataagacctgacaaaaaataggaatcaccctaactagctagcaaagcataaccacgacaacaaaactaacagccttaaaacaaaacgcagttcactgtacattggtaaaaactcgccgtcattcgtcatcacaccaccgcacacatgatcaggcgactccaattttgataagaattaagaaccaaggaacacaactttacctgaccaaaaccgaagtccgtttgactaatgctttcgatgccacatatcatggctccgacttcacaaccaccgtgcgaccgaatcatttcatcattatcatatcttatcgaatgaattactaataatctatcgaatgaattactgcggcacaagctaagactatctctatcctattttttgttgtcttcctcttatgatattactccactgcttttggaccacactagtggagctaggtttagatgtactaggttttcaagtttgctttacttagaagatagctgaaacatgatttcaaatagacaaaatagaccaaagtggaattggatagagaaaagattataattgatgtatgagttaactaagcgtcaccacaaaaacatggtttccagtgttattgatggttcggtttttccttgtcatatctagtgagcaaaacatatggtttagtgcattgacccattcacacccaattgattattcatttcattcctaaattttgacctaattccatttacacataccgtgagtttattttttattttttgcggggaacaccgtgagtttataatacaactcgtaaagagacaaatcattgtgataaaattatactactgttagacatacacatgactcccctgcaatagagtttacggatgtgccgaggttaaaaaaccgctccctaacggcaaggtcgctaacagcaataacggttgaaaacaagtgaaattcaaacattttttccgcaaaataaaatttagcttggatttgtttgaacttaaaccagttatatcgaacaatttcaaatgaccatgtcgatctatccaatgactgtgataatcagtctgttagcgtcgtagaaaaagtctagatgagaaaagtatcgagaggatgggcgaacataggtcagctcgaccaccaaattgacccaaccaacttgcatgatcgatctttgccgttaactacgtacctcccctcctacgagtgcacaacaccacaaaccagcttgtttcctccatatcacaaaaggtaaatataaaagactgaggaagtataaacatttgccgccaccaccattgattatcgagttcatcctctagtccccgcagtccgcagcagaggaaagaaagcatccaaaaatctaagccacaccaaaaaaatccttttttttttcttcttccttccctttcctcgatcagcatcatatatccaacacaaaaatctagcaccaaagatgcagcgaaaagccgagagagatgcctgccggttccggggcggggcgcgcgacgccacctacggcttgctactgctgctgctgcgcagtgcagaagcccactccactccgcgcgagacatccacttgcccgggcccggccggtccgctggtccccacggcgccacacgccccgagaaccaatcacggggcctcgcttccctttaaaatcccaccaccctctcctcccacttgcgcctagccccaccacctccaccacctcacctcccccttcccttcccttcccctcttctctcctctactagctatagtataggccgcccccgtcgttttgttaattttcacgccgaaatttccacccacaccacgcgccgcctgcctacctgcgcctgcgcgagctgcagatcgatcgacgagaggccgcgtctcggtcgcggggggtggagttgatcgatcgatccaaggaggggtatgatgaggaggtttctgccggtggggggaggaggaggaggaggggtggagccgtcgtcgtcgtcgacgacgccgcagcgaggggaggcggaggcggcggggctgcggttcggtgggggggacatctcgctgggcccgcacggcggcggcggcggcggcggcggagggggcggagggcatgggcatcagctgcaggacgggagcgtggacttgctggcgcggcacagcagctcgccggccggattcttctccaacctcatggccagcaacggtaagatcgatcgatcgattgcgctagccaacccattgttcgattttatttgttcatccgtgttcaatttggcgtcgcgtgcgtgcatagctagcccatcgtgtataggcgtatagctaattggttaggactactcagagtcacggatcttcaatttctagcttaattctgtcaggagagaacggctagctgtgcaaatgtcaacctcgtctttgccttcacatgccccatctctttctcgtcacacacgcacacgatcgaagtatcgatcgatcacatgaattgctgttctaggcttctagcaacaaccaccaaaaaaaacgaattccatcgatattattgttaatggtgttctttctctctcagtgtttcctccacactgtttcagattcttcccatacttatccgaaaccaaacgggtttgatcaatcgatcgatctctgtctacctggttcttaacttctatgcaactcccatcactactaactgccaaagccactagctcgctcggcgacgacgaaatgctgatgagctcgcgctatctagctaagctcgatcccttttgcaagttgcttctgcggcgcgcgcgtgaatcgatcatcgcgtgcgacttttcaccggtcctaactggttttttttttgggttaaaaagtggttttcgctaaggccgtcatgggaggagctagtgtgtatatcagactactatcagtatgcgttgtggatatccatggatgtgttagtctgcggctttttgctacgtgagttgccataaatagtatcatggagatcctctgtgcccatttttctactcagagccattagccataggctcctatatgtggttagtaacttttgtgtgataataatgcatgtttgccacagttagggtcaatatatatatatatatatatatatatatatatatatatatatatatatatatatatatatataagctgttaattaaggatccaccatgagatgttatatccatgagattatgcggcttaattgttttcgtgataatgtaatatgagttcaagtttttaaggcatatgttattacgaggagtgcacaaatttggctcggcgtgtaagaaggacgatggaaaactatgggctacacaggaggcgggttttctcaagtagggtatcatcgatagtgaaatgtggggtctagggttttgaatacaccgcttttattctttttacgtacgctttttataatcgagtgtctctagattgtcttattttctattgcaacttgctataaatggcttagtttttttgccacttgcacctggtgtccctctctctcatttgatccattattttcagttgcaaagtcattgcgcatgacaatccattcttcactacaatagtagacatggggaaaaaaaacaatttgaagctatagtggagagagcaaagagatagatgtttttttttctaatttaatttgttcataataagactagaaaaccatgcattcatcttccaggatttgcacaaatatgtacatttgattaattagtatcaccattcaccaacctagctagctaaaacaagctctttttaaaaatgtttttggcaagtattctcatttcatataaaggatacctatatgcacctcatttgatgaaaatcattgcaaaattatgcaccatcattatttattccatgagtattaaattaattctgcgtcacaaatattcaacgttttagagcatacagagataataaccctttaatgaaaacttcaaaatatcatttattcaaaaattaggaataagtgtgtcaatatctttttgaaatgcagatcaatatgaacatagagttatgttataattaattttcacactacatatataccaacatctaaaatggccttttgaccgagcaacctgtatacaacaattggtaaggataaaaatagtaccagtagaaatgtcgaaatccacatataagtactacaccagtactaaatttagtaattatactttgatcgaggtaggaatagcctcgagtaaagtttaaaagagtcaaatgtctttcagtggagcccatgtagcagcatttctttcaatgcggcagccagttgcactctagattctgctctagatagaccaacttgcgcatatatgatcaattaattagtatcaagacagcaagcacaattaaattaccagtggatcttagtgcctcgaaccctagccaaggcaaaaagaaaaagatgagggcatttgattaatttgtggattaattaatttttgatcaatggattaattagggcgccacttgccttaatgtaaggcggggaccacgtgtgtgtcgccgcaacttggcctgcggggtgggccccccggtttgtccaggttcagctcctctgctgatggcctgacggtgacgtcacggtcttgcctcgctaaagatagtgacctacggtgcgttgagatggcatgcgtgattgctcggcttcttgatttggcgtttgctttctctcttggctgcgtctatgtcagcgtgcgaggcttgctcatatgcacgggccggcacgcggcatgcacgtgctagcgtgtccggtaggcttcaatataccatctgttcgcatcgtagtacaaaaaaaccgaagaaaccatccgattcaatgaagaaaattatccatattcttaggttgttgtattttgaaatggagagagtacttgttcttattaatttgaggagaataagatcgatcccctggaagtagtcgtaggtacgttcaaaataaatataaaataaatatagtgtaatgtgtgcatgtcagttcactggtcagaaaataattttcgcgtcattcgcagcaatttgactagaaatttacattgtggaataaaaaaatcgtggggccaaaatttcaatgtttttaatgaaaattttaggctagatcttgggattttcttttttaacacagtacagacacaaacatgcatatatacacatgcatactcaacgctctgaacatacacgcacaccctatcactatataagcacctttaaagaggaccgtcatgaagtcgtcacagacactgtcaacatattttaaaagttgataaccaaccattttgctaagggcctgtttagtttgcgaaaagaaacattttgggtgtcatatcggatgtttgaccggatgtcggaagggtttttcagatacgaatgaaaaaaataatttcataacttgcatggaaactgcgagacgaatcttttaagcctaattaatccgtcattagcacatgtgggttactgtagcacttatggctaatcatggattaattaggctcaaaagattcgtctcgcgatttcctccctaactgtgcaattagatttttcatttatttatagagagaatcccttatataccactgaaaattggtctaatcccttatatgccattgaaaattagttcttcccttatatgccattgatccaaatttgcacactctctcacgccactcccgtcagttgactatgtgttgaccgttaattcttaaggaaaaaagacgtatttacccttctgagtatagggcatgcctaacaactcagagagggcaatatgtcttttttacttgagagttaacggtcaacacacggtcaactgacggtagtgacatgagagggtacgcaaatttagaccaatggcatataagggaggagccaatttttagtggcatataagggatcagatcaatttttagtggcatatgagggattatctcttatctatatttaatgcttcatgcatgtgttcacaaattcgatgtgatgttttttgaaaaaaaatttagggaactaaacggggcctaagttaaaaaattcaaatactttttgggcttctattgggacccaatagtaatccaaaatttgaaacctttgatttgaatagcgatgtaactattgggcatacaaggtttgaaaaaatggttacggccggattgctaactttgatattattttcatccaaaacgaccaatactgaattggagggagtagaaattaagttgcaacacgtaagtacatgtttgacgatgtgcttataagtaactagtaatagctagtaaagatgaacgcaaatgcaaacactaattttaattgtttttgtctctttcatatatataatattcgtctcactaacgatctactactctttctaattaaggtggtcgtttgaactcatctttctgtaagtttcatattcttaatacttgtgaccactcaaaatagaccttacattttaaaatggatggagtacaactttctggaacatatggttctagtcacgagaatattcctctcatatactccctccgtttctaaatattcgatgccgttgacttttttaaacatgtttgaccgttcgtcttattcaaaaattttaaataagtattatttttttcctatcatttgattcattgttaaatatacttttatgtatacatatagttttatatatttcacaaaaatttttgaataagatgaatggtcaaacatgtgctaaaaagttaacggtgtaaaatatttagaaacggaggaagtatatcctgtatctatcgtgctattttgtgctggggcaactcggccgggccacttttaatttcgtagtgctagcttgtaattttttttaattagttagtagtgcatagtgttgatgaatggtaattgttgtggtttaagttatgtttaactataataaccggtgattagtcaagtttaatttgtacatggatttcaaatagaaatttggtagtgtttaattatgaaaatatttatagaaccactatgcatatataacattacacctgcagttaaacacacatttgaacatgagaatcaaacctaaccttaattacgtgcacctactacagaaaaatattgtagaatcaaatacacactactccattcaaccttggagaagcaagtttgaacatcccatcacatctaggttaaacttattgctcaacacgtgtacctatagagctagctctaacggtatgctaataccgtaaactattgtttacttgtcacacttggcagttttcaactagcgtttgggtaacagtagctctttctctcacacacacagttaatttaactaattagcgatcattagttaatttccgtgcttgctacttggcaataaactaagcaggctttccaggctcaaaaggcgggggaggcagcggagccgaagcccaccaccacccttccatggccggcagcggcagcggcagcagcagcggcgggaggaagatgaagtcccagctgagcttcacggccgggccgccgcacctctcgcacatcgcggaggacggcgccttccccgaccgcgccggcgccgaggcctccgtgccccgcaccttctccgccggcggcagcagcggcggcggcgggttctccatcgtcgggccgtgggaggagtccagggacatcatctccaccctcggcgggtacgagtcccaggtaaagattgctcggcaaatttgattgctagggctaccttcattgaatcattgtacactacaaggcttcttgatctcttcatcccttgtttatatttactaacattcataagaatttggacacatgtatgaaacacatacatttatacatgtatgaatctattcaaaactcaaaacaacttataataattaatgtaaaacagaggaagaagtagtagctagctttgctgtgtttgtgatatatatatatatatatatatatcgcgatgtgttcttgatttcttgggcgtgttggaaatgggggcagttcggcggcatggcgagcacgtcggcgctggagatggccggcatggacaggtacctgcagctgcagcatgaccaggtgccgttcaaagtgcgggccaagcgcggctgcgcgacgcaccccaggagcatcgcggagagggtacgtacgcaatatcatgatcaaaacgcctctatatttgcttttgctttctcttcagatcttgacacatgagcatgtacgtcggtgtgatcgatgcgcgtccgtaggaacggaggacgagaattagcgagaagctcaggaagctgcaggagctggtgcccaacatggacaaggtggccattacgatttgaactttgcataatgttcatacctatatttacatgatatttgaggaagaaaggaacatccctagctaagtattttcttttaaaaaaaaactttccacatttcttgtgccattagcacacagattcatgtttctcgccttaataatagacatggcaaatgcacacgcattcacccatgagtgtgcactgtgaagtgtcccttaacacatgctcaacaaattcatggacaccaagcgcaaaatcataacctaatagaatttctagaaaaagcgtatccatgtttgtgtagttaaattctataggcactgagattagagctttggtgcatgacagccacaactccaacaccataccaaacatgctttctcaacaaattcatgattattgtatatagatgaaaggggtcgtacgttctctcatctagttctagctaatattaattagcggtaacattttttgcgcatgaataatgcaaccaattgagtaattaattatgttcgtgttgcaacagcaaacaagcacagcggacatgttggaccttgcagttgagcacatcaagggtctgcagagccagctgcaggtacgcatatttgaggatttcttcacaaggactaatcccgcaagtaggggataagattgaaaattcacatttacattttttttcgtgaatgcgcaaaaggcgcgcccatcaatatattaaaaggaaaagaggttttgttacataacgcaaccagctagacgagcctatgcgaaggaaaggaagaaacgaaaaaaaaccgacattgtctatcattcccttttgttctaatcaatttgtcttatttaaatcttttccctctcaagtgatgtatgggctggtaattaatacacctctcaaggctgagagataacatattttctatttagatttgttagcgaaatagccgtgctttgctacaaataactacaaattatatgcatgctagtattgtttggaacaaattaactacgaggtgtgttagaagatatattcatccctggggatctctttacactataaactttgtattttagagatgaaataagatagaagaaatatatatataagaactagtttgtaatgctgaagcatattgatcggataagtagttgataaaagtatatagctagcatattcactggtactatcattaattgtcttcgtctacaaaagtatagatcacatttgccattataatggttatatacttggttagaactcgtacgtgttgccttttttggttgttcatattttcattttttagccgaggctccaaaacagaagcgatataaacttttgaattttgtgtcgtctttctgcgtgcaggctctgaagcatgagcaggagaagtgcacttgctgcagcaggccttgattgatgaagcagtgagacggcgaaactgaaaggtatctatccttagtttggaaccctgattacggatgatactttcatatttccttgagagtaacgcatgcgtggatgcatgaaccaattaatgtcagtgacacaatccaaatcgaccgtgagcattttgtcgaaatgtgtaaattgttagataggacatggcaagggacatgtatatgcatgcctgcatgcatgagtgagtgcatggagctagctactccgaaatagcggggtgcagccattgtgatcccttaattaattctcgatccactgatgattaattagcttgtaattctgtctttaaaccttttttttaatgacgaggggagagaaaaagaaaatgaaattttggtcagcatgcagaaagaactacattattaattcgtgccatttggggtgctgtttatagctaaccttctcgatcgatcacctttgtgtgtctcaagttgcaaccatactggtttaatttgtgctttcaatgtaggaggactaatgcagtgtacgtgttacgttgatgcaataaaaatcaccctttttaagttattgcagcaattgcgtatgcatcactactaagaaacgacttttggggcgttattttcgcaggcctttaagtacatagagtatttgaccgcctacaaaaatgtgttttgacggttttttttaagtagtgcatgatcatctcgtcgattcacctgtatcactgtatgtatggttaatttgggtttcggagttggactatgtctcagcttaaatcgtttccaatcgaattccacaccgcgcgcgcgccatgccacaacaactgctgcgtcgcacccacttgcacttgcaccgagcgccatggcgagtaggccggttcatccaatcctcgtcgcgttcttggcgctgctcctcgtcggcacttgccaggcaaggccggctccggggaaggccgcgtcgtcgtcgttgtcatcggcggcgaagggggcggtggtggacggcatcacggacatctacaacttcggggactccatctcggacaccggcaacttcctcgccttgatggagcacaccgtggcgcctccctacgtacggcgcggccatcggcagcgccacggggcagtgctccgacgacgggtacctcatgatcgactacctcgccaacgacctagggctgccgctgctcaacccgtacatcgacaaaggcgccgacttctcctacggtgtcaactttcgccgtcaccggcgccaccgccctcgacgcggcggccctcgcgaggatcggtgttaccgcgccgcgcaccaacaactcccccactggagctggacgctcagagagagctgttggtgtgcgaacggaattactggcgctgacggtggaaggatgagagtgtcacggaacgaagaaaatatcgcgtccaaatgccatattatgaaagtagtgcgaattgagtggtctatcctgaaaacggtgcatattcggtggcatattctgaaaattctcgagcaagagaagctggcgcgagcttgctggtgatggtgggagagatcgccgcgaacaggccgcgaacaggaggtcgtagcgccgcgcggacgtcgggcgcatgatgaccggcgtggtggagtcggtggtgctcgtaccagaggtggtgcggtcgcgtggtgagcgcggcgagggaggtgctcgagatgagcgcgacgcgggtggtgatcccgggcaacttcccgctgggttgcgcgccgagctacctggcggcggtggacgagacggagcgcgcggcgtacgacgggaacgggtgcctcgtgggtctcaacctgttcgcgcagatgcacaacgtgctgctgcagcaggggatccgggagctgaggcggtcataaccggaggccacgatcgcgtacgccgactactccggcgcgtacgtgcggatgctggagggcgcgcgcgacacggggttcgacggcgtggcgctgaccaaggcgtgctgcggcgggaagtacaacttcgagatggagcagatcagctgggatggcgtggcgtccacctgactcagcgcgcgtacagcgtcatggccgagcttctctaccacaagggcttcgcgtctcctgcacccgtcaagttcccgcaccagtagatcgtctggtatttgcaagtagtgaaaataatgtaagctgtgacattttttgacgaagatgtaacccatgatttagtcatatcatgtattccttttttttttcaattggtacaaaaaatagcagtatcaattctttttcactgatttcaggacgcttctaatttggatttgccgatgcttcacgagggtgttacaaagttgcagccacccctattcctactttatttctaaactgatgtacagaacgtgtatttatgtactccgtggatacaatacaatgtgcctcagctacaacattgtttatggaggagtacatatatgaactacatgctacggcctactcctcaacaggaggatccacccaacggccatggtccttgattaactgaatcaaggcgtcagtggccccctccattgcaatgccccgttgcacgacggtctgcacccaaaacaagtagaacttgtgttaatggaaggaaaatggcagctctaagtttttgtttcagctcaaagagcatatatatgccatgcagttaacatccctactgttgattgtgtttgcatgatcatgtacaaatattgacttgcagctatgttcaacgatataccgtgatttccattattccatttgatatgattcaacttccacaagtataggaaaaggttaccttgccaacataaaggtcgatcttcccaggagcacctccaacgtatccgaaatcagcatcggccatctcccctggcccattgacaatgcaacccatgatagcaatctgccaggcaaatgtagacatgattagccatcaggctagctaatatgcgattgaaaacaagggaggcagaaggtctgtaagagagtttacagagacgcctggcagatgagaggtcttctctctaatctgagcactgacttcttggaggtcaaagagtgtccgcccacaagaaggacaagagacatattcctgcagcattaattaacggtcagaaatcgccaaaagaatgttctgcttcacaagagagaattgcctaaagttatttatcctcttcggtaggctataaggttcatttactgttaaaagtgcaattttgcacttcttcatgatatctcacgagttaaaggttgacgttgttcatgggatctacagtctaacagagaagaattcatcagcttaccgtttttgtgttgcgcatcctgcagccctgtaacaagttgaaggatgtgtccctcaaaaactcaaattcctggtcagcagcttcaagaagtacaccatcaccaagaccatcaactagaagagcaccaacatttgccccagcaccaataacaaggtcatctctgcatataatttaactcaaataagcacaagagaataaaggtacagtaatttcaaggggtaaggatgggcggtcaatgcatctcttaataagcacttcatagtacctgttcacgcttttggggaattctatgtgatggattacagggaagttcaaaccgttggtttctaagtactcaaataacctgcaaaacattattaaaaaaaataaaattttaggtaaagagaagtacagaacaatggaaaaccaggtggaaacattggtctgtatgtcagttttctgcagagtcaaatccattttcatttttcatgcttaatgtgtaacttagaattgactatcggttcatcccaacaaatggtaataatggagggagtggtattaactggcctactgtgttcacttacctcctagcagcgtgtactctgccagtcttctcttcaccataaggaacactgtgcagtaacattgttatatcatcaacacccttaagaagatctagctgttcatatgattcatctccacgaagggtgacagccaatctagtgcctacataaaaaaaagattcatcaataaaacagactaagcaaaatgttaaaatacagaaaatgacataaacacaattcacaaaacaacaaagatcattatcaaattcaaatgtctaccttctggcaaaagtttgtgtgcaccgcttgacagttcatccacattgacaagagcaattgcatgtgggagtggctttgtcagttgctctgataagggagtcaacacacccatgctgatgtcaactaatcttttgagtgcaagcctctgtaccattttacagatttcaacacaaaaattttaaaggaatagaatgttaatataagcttgtgatttgtgaaaagaacaaataatgttgaaggaactcacagcttgagcatcttctacaggtgggagctccctcaaaagaatagaatctacagttgccagatcctgatattcatagaaaaattaacatcagtttagactgaagtaccaataaagtttagttgtttgctagaatgtacagctataaggatcagaccttgaaaggcatgccaaccacaagctttgcagcaagagacctataaaggagctcaggagcctgaaaaataagagagccttccatcattacaaaatgcatcaattgatttgattcagatagaaaaaaatcaatgccttctttttgctattgctattctcactatgtactatgaactatgcatagaatgcatggaacatggctactgaaaatatcatgttgtagaattgtatattacaaaatagactattgtcttgaaatatattttggtaaagttacacaagatcaacacattgcacaaaagggtaacaaatatgtgagttaccttcaactgatccaaggaaactgacatcaaaacagagccatcacggtgcaagacccctctgtagtctacttcctcaccctgtcataagtgcaactaataagaaatctagcactattgtttttatgataactatggactataggagttattttgaactaacctccttttgtaaaggcaactgaccacttctacgctggaaatcaaaatagcgcctgtgcttttcttcaaaaggagcctgagaacatataatgtatataaatagaaattcttaaaagaacaaatagaacaaaacactactaaaaatagtcaaaattaatgtgtggcattggcagctaaacaagagaaaagtgtaaaactagagaaaggtaataaatcgttaccactcctatttgaaggtctgcggcatgtgtgccaagatttgccaatctccggcaaggatcaatctcttcttcaggtggttccgtgagggagacacggattgtatcgcccaagccatcctgtaagacaacaaaaggaagacataaggcatgcttaccctttgcagatggaaagatatgatatatgcaatataatacacaaagtaaaaatgcaattaccatcagaagtgttccaatgccaatggcagacttcatcctcccatcttcaccctctccagcttctgtaactcccaagtgcaaaggataatcccaccctaggttatacatttctgctacaagcaagcgatatgcttggaccatgataacagggttacttgctttcattgaaaacacaaagttatggaagtccagcttccgacagatcctggcaaattccaaagcagactcaacctgaaattatttgtagaacatgtcattcatctatcaaaacgatcattaattgaagacatccatgaaacgaaaagttatttgaatgaaatccccagaaaggaaataataccattccgcgtggagaatcaccatagtaactcattatgcggtcagacagacttccatgatttgttcctatacgcattgctcttccatactgcttgcatttctcaaccaacggggagaagacctgaaatgatatggaagtggctatgcaagtaaggaaacatactgcacattcttactgactaaattaacactaaagagtgagatatttggaaccttctcgatatgctcaagctctttttgataatcatcttcagtatattcaagctgctcaaattgggcacggcgatcagctgcaagtagagttctcagcatatgcacagagttgataagatattgacactaaaatgatacacatcattatttcactcaccaaaattccctgggttgacacgaattttgtcaaagcattcagccactcttaaagcaactgtcggggcaaaatgaatatcagccactagggggatgttgtaactgttgaaatgcaaaagcaagatgagaattcattcatgaaaactcactgaatctggaaaaatgatgactcttacttcttctgaacaagagtgttcttaatctcaaagcaggcatcagcttcctttctaccctggactgttattctaacaaaatcagcccctttatctgctatcctcataacctggaccagtgctatacttcgttatttcactagtcatgaaacatagaacatctaaaagaacacatgattaatgcatgcccagcattcaattattcaagcatagaattaaaaactaaaacatagaacttcaaataggagtgtacctcctctacggttttagcaacatccttggtatccgaggtggtcatagtctgaatcctaatgggatgatcactgccaagtggcacattcccaaccatcacagtgcgggtttttctcctccttgtctcatatatagattcacaatacttttgcctgggaactaaagaataacaaaagggcaaaagacatgctgtcagattctttacagaaaaaatgttcattcagttaaaagcactaagaacaactaacacgaatatacatgcaaggtgaacaacagccggcgagttatacctaaaagtgggcttccttctgaagatggctcgagctccatggtatcagaaccggtacttgagctcttggccacaagcaccctgcctcttgatgagcccacccttagagtagcaggaaccgacaagatcttagcaaagtcgacgctcctcgtgaagccgatgccaccatcacggaccctgacatgtgggagcggcgctggtgccactccggtggccatggctatctcgaagcaccaacttctgggttaggcaatcctacaaacaggtgcatggcaatggtagagatgagcacagggtcatctttgtgggttttaatggacagaaatggaatattcccttattgcttccagtccaacaacaggacaaccatggtgtgtagttattgaaaattaactatttcacaattcgtacaaaatactgacatatcaacaattagcaaatttaataactttactttgctaataataagagaggttggtaggacagcatgaagaaactgatgcttctactacaattccaaagaaaatcaaagtatagcaccaatcaataagcctggtcttttaaatagcatttccacttagaaattgaacatgcttgcagaaaattgagataaatattttttttaaaaaaaaaaaaactgattcgtgtatccttccggctaagaacaaagggagaaataagatggcatgaactcttgatagctcaaaaaaaactaagaaaaattaagaaaaatccctcctaatccaaagataatgctctctaagttgatcaaatcccgaattttcgcagccaatctcaagagctctacagccctctgaatcataaaaacccaaaccttctaattcccaagcagaagcacgaattccagcagctcccccgcagcaattagcaccgacaacgccagctcccccgctagaattccagcaaataaaccaagcacgaattgcgcccaaccaaccaccacaggaggatccacccgatcggcgtccccccaacacacaaacacacacacatacacaaagctactagaaatctcaggaagtagagataaggctccccaacctcgtagctcccctccggcgaccgcgacgagatcagcagcggcgaggcgatgcgatgcggggatggagacagagtgcgagagctcgcgagctcggcgaagaggacgacgaactggcgagcgagtggtgggctttctaccggattagcccatttatccccagaggccggcgcccccgcaccgcgcggcgcgtcgtgtggactcggtgcacgagcaccgcgttgccgtgggcagtggctgcgtgtggggtccaagagatgaggtgttggtggaccgggtgcatgggaggggaaggctgacggcgtggggttggaggtgtggaagtggggttccgggctctccccgccatgatttaatcgtgcccgtcgttttcccatgcgcttcgtaattccattatcattttgttttgtttttattttattttttattagttcacgatggagagaggctgttttgttcgtttattatttctgccatttgtttttcgtggccggcatgggattgtattgtaccatgaaaaaaaaatagtttaatctggtgcgagagatggtgcttgagccagataaaattgtctgattgttccgtattgttactggctagaggagaaacttcacgaatattcatgggtcatcgaaggatgttttttccttgatttgttggataattcgaatattttattgagaaaacaaaaagataaatttggacttatttaagacccaaagttctttcacggcagctgaggtggtggaatgggactgtctaagaatctggtgatagtttttgtaggaaaaatattttgaacataacttatagtgtaagttgtatatagttatattataattgctatgtgaagtatattgtaattaaggtgtaattttagttttaattcaaaatcagctgataatgttatttttaaagtatttgtaatgataaaataaatgataattatattttgtaataagataaatcataaaacgtatgcccgaaagtcaagatgctaaacaacaaaaaccatagggagtgcagtactatttattgaagaaataaaaaggatattaacattctttagaaataaaagaaacttgatgttgtttaataaggggagaaaaggacatcatttagttcattacatttcaacatttcttccatgcatgtactttcgatgtttgatcgtgactttgacaaggagatcgatcttaattagctagtgcagcttgaaacaaagctacctgcccaaacatacacacacatcgtcgtcaaacctcatgttcaatgccaaaggggagtgtggtttgagcggctgacttgttgtggagcaaggcatccgcgcgcgacggccgccgaagaccataatcaccttctggtccggtggcatggtatgacgggtagatgacaatattgagacgatggccagttcagtcacaccacatgtgttgacctggagcaaagcagatggcacgtttccctgagacaaccgtctccatgtgggcggaagttctcccacacatgttttgggtcgtgggaactttgggagcgttgaaaggtaggcataaaaaccgtggtggaaattttcgacccatcaatctagtgttttcgtaacagttatactgttttcgtttctagttatatataaaatcgactcatgttgttttaattttctgttatgttgatgtcgtcattgaatagttatactgataaatacggaaaattcttgacgaaccagtaaccgtttccaatctttttacctcagataaatgtgcaacctcatgtgaatttaaatgcgtgctagccgggatgaaactggtttggatagtttccgtccgtccgaaccatttttcggattcggatagtttctgtcggaattatccaaaaattctcggattcggaaacgaatttggatattttttctcggaaacgaaaacgaatacagtaaggatactatccatcggaatcgaaaaacggttaaaaactatccgaaatttttttcggatatccgcagatattgagcaaattttataaaaaaacatgtatatatacataactttttcatacggaatcagatgaagacaaacttcatatcaacattatagagctcgatgagatctacaactttattattgactattttattatttaaggtcatttaagggtctaaatattcattataatataccatattaaattttacaaaatctcagatctacaattcaaacgacatctgatggagatgtgttccatatcaaagttgtagagctcaacgggatctaccactttgtagtttataacatttgtacttgaaagcatttaaagtataatacatacattacaagtttcgaagatgtgaagtaaaataaataacatctccaatttatgcaatggtaaataagttatacatctagtaaaaggtcttggaatagaaaatgataatcatatttgcatatggatctcttagaggaacaaccatgaaaatcgattttcacatacgattgtggaaccgtctataaaattgacgatataaatgttggagatatttaactaaaataataagcgatatctctttcttaatcaagaaactcaatttgaggggttttttatataccggtaaatattcgctactgtattcgttccatcttatattcgctccgtatctgtattcgataatattcaattttatttccgtatccgagttttcgatttcgaatccgattccgaaaaaaaaatgaaaacgaatatgataaagctagtttccatccgttttcgatccgttttcatcccttgtgctagggcatacttatgtgggtgtaggtatgacatatgtcttccccttcattctcgctaagctaggaatcattcttgttcccgatttccgtctcttgagcgcgagactcccacactagagaagagcgagcgggagggcggtgtcagatggcgtgatcttaaatcgagcgatctgatgaggtgcgggtagaggaatctaatttctgttgttaggggggcatttttttattctagggaattaaatttatgctgtctattgaaaataagtatatttttaatccttaaattctcattagagaatgaaaggcagatttaggaagagactttcaggcaactcttggccatgctcttagagtgtcaaatacaggaatgtataataatacttaaccaaacaatattattagagtctacagtaattatcctagactgtttaattaatcattttatagcaaaaatgaaaaagtcaattacccaactttctccgatccagtctatgaagtccaacaaacccaatacgacagcccaatgtattacagattgagttgggccgcaagcccgcaaaccaaaaccatactgtgaggttgtcagtgcacgacgcgaaggaagcagagaaaggtcagggcacatatggttgggaccgcctatgcatcactcgggtgagattttttcttccgaagagaaatcacgcgacaaacgtttagcaaaatcgcatatggttttatttataaatcaaaacggctcaaacttgagtagttttgatcagaaaaaacgcgcaagccatgcaacaccgcctcacgcgcgcgcgctgttcgtgaaatttatcggaggcgggtgcacgaggccacggcggaacagcagctcggccatgacgccgtacgcgcgctgcgtcaggtggacgccgtcccagctcacgtacctccccgggtccgcgcacgccgccgtccccggcgcgccgcacatcgcgcgcacgtcgaacccgtacgcgcccccgccgcccttgccgcagcacgccctgaacacgcgccgctcgtcgaagccgagcgccgctgccccgtccagcgtcgcggcgtacgcggcggagtagtccgcgtacgcgaccaccgcggcgccccggtacgcgcgccgcagctccccgacggcgcggcgcagccacgcgttgtgcagcgccgcgaagaggttgagcgcgacgaggcatccgcgggcgtcgtacgccgcccggtccgtcgcgttcaccgcgctcatgtagctcggcacgcaacccagcgggaggttgcccgggatcaccacccgcgtcgcgcccatgtcgagcacctcctgtgtcacaaaacccacaaaaattaatttagttcttaattaattactttgtagccaggattattattttaaaaataaggtcccaaaaattaatggaaaagaatggtgtgtaccttggctgcgctggctatggactgcacgacttccggtacaagatcgacggccgtggcaacgctttcgatcatgcgtgtgacgttgccgaggctgtatccaccgtccatcggccaggtctggaggaaggcgtagttgtagtcgtttcctccgatctctcccagcataaccagtgacttcgacagcttttcacggatctctgcaatgcaatgctcacacaaaagaacttttttctttcagaaaaaagtatatatatataacacaagatttctctatatgaaagtcattctagcactgaaaagctgtacattagcttaattatttgtgagatacagcattgctgactggcactgatcaggcaccggtcgaaattaagctgaaatgcgtttcagtttgttcgttcaccttgaggagaactagttgtggagttcatgaattccttgaaccatctgagctgcacgtatatatccggttgaagtagtacctcaaggtcttaggttcatatcctctatggatggattgtttacagggttaagttccctacttcaatagccgtatatatccggttggatgtagaggccgggtaaaaaatacccttctctaaaacaaaaaaaatctgagctgcacgtcgagggggctgttggtgtgggggacggtgatccgcctggcggcgagcgccgtcgtgttgagcgcggtggcgccggcgacggcgaagttgacgccgtgggcgaagtccgcgccctcgtcgaggtacgggttgagcagagggaggccaagatctctagctgcacatcgatcgatcatatccacaatttaatccgaaacaaaaacgcatatatatataacgtaatataatattgtttcttccatttttcagacggaagagagagagaaattaaactgatgacgtcaccgaggaagtcgatgatgaggtagccgtcggagcaccggccggtggcgcggccgacggtgacgccgtagggaagcctcgtggtgtaccggagcagcccgccggtggcgccttgcctggcgaggttgcggtgtccgacagcgagtcgccgaggtttgtagatggccgtaatgccgtcgactactaccgtacgtgtcgccgtggacgccgccgacgccgccggcgatgtcgtcggcggcgctgatccgaggcatgagccggcgaacaggagcactgtcacgagcggaacaagagccatggccgcgcgcgctaggttgccacagggtacaggtcgctactttgaattattttcccacgctaattaaagtaggctcgatgcgaaacgtggccggtttttttcgttacgaaactcagctcttccgtagggaaacctacgcgacagcattaatgcattaatcgagttgcttgcacgaatctccaagtgagggaggggttacgcgttaggcgctgccacgtgtatcgatcggcacgaatctccaggcagtcggcgagggttaagggttgggggcggaagggttcgctcgtctccctctctcgtttttgcggcggcgcccccgagcgaagcagccgagcacccacccgccgccgccgccgtcgccgattcatggccaagttcaacgtggtgcagaagaacaggcgcgagtggaagcaggaccgcaagcgccaggcccatggcgaccccaagaccggcaagctcaagcagcgcacggcgcccgtctccgtctccggcaagcgccagcgcaagctcctgcgccgcctcagccgggtacgcttggttacccccccccccccccgacatctttccccctactcgtgtccttctcgcggcgcagcggcatgctttgtggtagtcgtggggatttcttattttctttgttcttatttggtgggatctggtgttgcaggagcagaaggaggctgtgatggccaaggcgctggagaacaacatgggcgacgtcgagatggtatctgcggaaggtgcgtttgcgatggtcattgctgatttaattcgtttgaaacttgcaagtgattgtgaattgctccacgttctgtacttctattacactgaatagtgatgcttgttgtacaattgggaattagctctattgttgtgcagtgattccatgcaattttacagtaatattggttatgttggtcatggttgcgacttgcagtgatgtcttcttttatgctcattttgattattttgggcccagttgcaatatggcaccatttgtagtcataatttccacctcttgttggtggaagactgacaactaatgtaggcaaaaaaaactttatgcttgtagttacagaggttggaacagctgtttttcacttaaatatagtattgcagacgatgaagataaggaaagtcaggttgttgcgtgacagtgtgagtgaatatggtttattcactagattttcatgatgatggatggttgtttttgtatgtgttgattcagtgtatcaagcaacaccattctgttctgttacgatgaatgaattttactgttgtctaggtgctctaagttgtaatgttgtgaaacttaccaggctatcctagctgtgtagtagtaataatttttatttggctgtatatttactgactgctatttggttgaacgtctgctgttaacacaaggaacttatcattgtacctcacgtggttaaactagtgtttgaataaataaggaaatatgcattaacattttcttgtttgcatgaattttggtcaattgttatactcctcttgtttatttttggtgagctataagaaaaaatatatgaaatattatgtttgagaatgacttagtgatggtaagccaaccatcaaggattcttgatagttaatcctaaaggcagatgtctggaataaatttcaaatcaccgttttatatttagtttgatttgccccttttcttgagatttgttggaccttctttatgtgtgtgggttccgaagtttatttcctctggattatattgaactggtgatttgagatgagattctagcatatgttgctcttggtgttagtacgttttattctaggacggccatacaatcgtacactcacacttaacaacttagtctagctagctgtctgctactgctacatgcgtatccattgttttgcattgacacaaggcaaagttatgatagggttctcaggttgttccatactaggaagcaagtgtgagtcagcatgactagagttattagtcctaagttgaccatgttatgcagggtattctgttaccatgtgtttcttcactactactgccatgttatctggatgtgctgtttacataatgatttcgttgccttgtcctctgtttaggcaaccacatgtttatttttataagtatctggtgctaaatgtgacacctgattttgtgttttttgaacaggctcttcagaagctgcaaaggacaagtcacaactgaagtttaatgtgaaaaagaactcaagagtacagatcaaaagattaaaaggcaaaggtgagttattcgtgtttgattgacctgatattttcttcataggagttgatcactctgtttacttatatttagcttttgtcctgttagaagatccattaaagctttgttgtttcattcttcaggcagaaagaaagccaagaatgcaaagccgccgacaaaggacaaagttgacgccatggtggagtgactggatgtggttgataacactcagcttctacattgttgaagggatccgcaaggattgaaaataccatgagctatcaaagcatctttactgtcttaatgtttagtacaagctagttagctttctaatcaatgtatcctactaaatacgatgatcaagacctgagaggttaaatgcatggtttttggaatatttgtatgaaagcctgatttgcatggtttctgcgtatttagtcgtgacatcctgtctgcacttcctttcacgttggacacaattttgatcgatcaatcaagcaaatcacctgactcgcatcagcaggcagcaggggcgagctcatattccaattattacattttcgactccagtaattactatttgctaaaggctcgtcttggctagctcaggatttaaaaaagggaacactctgcattgagtgtttgagaccatgctaaactcttacgttaagctattatcacaattcatattggagtgaacgtaccatcccgtggctggagtcaagcagaattcggtggcacggtatatgctctgaagtctgaactgctacaatcttacaatactgattggaagctgaaaaattcagctcgttttccctgcctgtgcagtcgcagaagtctttcaatattttgtggagaacaggagtagtgtaattatagacaatataataatgttggaacaaattatataagggaagtttctatttgggcctacgtgggctggttcaaaggaagcacattaacaactttccacgatccagtaacacaaggcttgtgtggctgacttgtgggcccgcaaacagctaggcgctcccgccctcccaatggtctaacgcgctcgtcttcggcgcgctcaactcaaaaccacgccgaccgaaaattctcctcttttcccctccccgctgctgctcctcgccctcattttttccgagcacattggtcgccgccttccccaaattaatcaccaccaatccgcgtcctctccccctcccccaccggaggcgccaccaccgcggcgaggaaattgcggcaacgcgtgtagcggcgcctgcgcctcctgccgccgtcgtcgtcccgttccccgccatcgccatcgcgccgcaggtatgggccgtctcgcgcctatgcctctaccgcacttcatcctgccagaaaaccctaaccctagtgccgccgaccagttgcgtatggatcggcgaccagccgcacgcgtgtcacgcccagaaattcacgaaccagaatttctaagctgaatgtgcattaaacccctgtccagaaccagccagggtacacaaacgacaattgttgacatacagatccacgtcttacaaaagtataaaagattacaaatgcagcggaaaagataaaagcgagctaagcctgaagacttgactcctgcagcgggcgattccattccacaggcatccttgacggcagcggcgaaaccaacttcttcgaaacatctccaactgagaaaaacttcaactctagtgtgggggaaaagagagcaagactgagtactacccagtgtactcagcaagtcatactggaagagaagttatgatgcaggatatatccaagggaggctaaaggttcttttgcataaagctagcatttaaaagcagtagttgaaagcagtaaaacagttgtagtaattaatcaatattaaccaatcactgtcaaacgctacactacgttgcaacaggcccaaccaaccacttgaactacaccagttcattagctaactaggggtgagactaatcacggtgaatctggtcgaccgcccataaccgtgggcacggctattcgaatagttttactcagatcagaggtgtacaactgtacccacaagacacagccccacaacacatttccgtgcgccgacatgccaccacgacatactggaaagaggccgtgacaggacccttcgcataaccccctctaactaatcacaccacacctcgggtttcacccccactcctcgcaaggcagcgggcagtcccccctcgtgccacggtgaatccggaagccgatcaaccggacacgctggccgacccacgcgccagcaactcgcgatccctccccgcttccttgccatcgccgccgcccgccgctgcctgggccgcctagatatgggctgtcccgcgcgcctatgcctctaccgtacttcacctcgttgcaaaaacctaaccctagctagcgcggtctaccagtcaactacgaaaggatcgaaggatcggccaccagcctcgccagcaactcacaagtcctctccgccgcttcctcatgttcaaggccatccccgatgtgcaaggtatttggccggtatctctcttctgaattctaattaccgaatccgcttgaggctttttcgatttgatcgggtctggaaacatgaagcgattatgcgatttagaaatgttgatccatgcacaaatgattgttgcaacttaggtggtgaattatacctctcccaagctataggtggataaatttgcatttgtacataagaggaataggggggagtttggtttctggattattcaccgcttcgtgttgtgttcatccgtacgagtttcatactatctccgtgcgtctgcaattaattagtcggtcttgctatgctgatatggatgtcgctcattctcctgtctgtctcttgctttccctgctgagtttgttagctgtttcatattccaaattgcctttatcttattatttgatcacattttcatttcctactatcgatcgaactattttgtttcctctagtaaccatttaatagatttggagaatatgtgtatcttattaatcgatgtttttgtgattgtgcatagatcttccccaactatctttctctgattaagtaacctcgatactgagcttgtgagatcactcggacgattccactttttttttttaaaaaaaataaacaaatgcagaagctctgtttcattcattctcttagattccacgtttcggtttatcccgaatccgagttccatttttatagccatgagctttttcgttgttacaaaaggatccacaagaattataaatgttttcagcttgaatcattgtttgaatttgctctgataagcttcaatcatttcagcttggtcttaaaatgaaatttcatcatttattcgcttgtggtgaagaggctaatgattgcaacccaatccacccaacttcaacaccaacagttatctatgtccaagtgccagggtatctatcccagaagaaaagggtgtctggacaaaatctgattgtttcaaaggtccagaaagttcttcctgaggaatcaagaataaagtcagatgctacaataaaatgggcacttcagcttcatagtgctggctattctcttagtggaaaatttcaggcctctgatctctgtgtcgatccatcaacagaattaagtgtttagtcacaaagagtgctgcttaagaaagcaactatgaagaacaaaaggaaggattttaaaagattgaggctaattatcaagcaagacatccttggaatcaaatgtgaagctgacctcccaaatgatgtcaaattgctattggaccttcttaaagactatcatgctagtgactaggtattaattgctcatcacccggggttgatgaatgaagataacaagatttctactatattccacataatattcactgaacttgaagctctaatggtaacagatgccgtgaagtatcagcgcatcatctctgctttggcttcgctgtatggaaatggttgctggaaaccttacgcctattgcaacaagcatgtcaagggagtttttgttgacggctgttaaatacaaaattctcgccgtcaatacctgcataaaaccataaaagtaaaacatccaatatagtgataggatttatttctaaccatttccacaaatgttggtgtatattcgtatgcaggtaatcaactaccaaagatgggaaagaatgagcatgaagaatacaaatatattttgtgctgatggacccacaaggttttgagctacagcatataaaatgtgcaatcattttgagccaaaacatggtgtaccataaagtggggcccacatgttagcattctgaagaaggatatgggccaggggagccggccacagttggaccgaacccccagctggcccaatccagcccaacttcggcatgatagttgtacttctcatcctatgacggttgtggccgttaataccggtggaaaccgtcatcaaaagagacacttggcaagagaaggatgaatatgctatttggattctatggagaatattccttagcatctccactctctcaagtcacctccacactataaatatccctctcctctccctcattcacacacactccaagcttgagctgaattataagaggctctattgtactactttgtatactagaattagaaagagagtagagtagaagaacttggaggaattccggagttctcggtaatcctctcctatttcttttattctgttaattactctattttcaatagaaatatcttcctgagtaatttagatttacttgcaagaattatctattggttagttcctaatcagcatacgagattattgttcactataatcaactaaattataataattgctttagtgagttataaacactagagtagatattaattgcttacatatggtgtttaggtaatttatatctagtaattgttgtgtatcccacaatgcgtaggtggtaacagccctcaagagcacttaagtccttcctgttcgggtacgtagtagagcgacatttgggaacaacgggttgccagtgcctgaagtattgcgctaggattaaaattaagctttccttggacactgtttctcactagaaaatcgtctctattattggctaactttagctttgtgtccttagatgaacatgataagaaagtaatacacattccttgtggaaatcgataactaaaaatactcccgggtgaagtgccacatcggtatcttccatgcgcttgcgaattttatttgaaacgttaagaaataccaacagttttcaccttcaaaaaccgcatgaccaactatgaagattctgctgaagggttttatatctttacagaaactactttcaccatatgataaaggatcactctacgcatgtccaagaggtaaaactgtggtgtttttttgtgcacaaacagatggaacacatgttgggcacaattctcttggggctcatagttcaattgatgatggagctacccaaatagtcagttctgggtagcatattttgatgaaggaatgaagctgataaacaatggttcaattgagtaattgccaccacgctcggattttgcgtactaccttttgtcaacttaactctgtagaaagaatgattgtacggtttaaagataacattatttgtttacatagatatgtacatagaaattacagaaaattgctttgacactgggctaattaagaatgattgtacggttcaaagagaacatcattcgtttacagtgatatgtacatagaaatacagttacagaaaattgctttgacgctaggctaattattttggtagtcattttttgcttagcagtagggtcctctttacttaaaggttcggattaaaaaggattaatggcaaacttgtttgcttgtcctgatacagcctcttttaactatgatatttatttcttctgttactggtctgtatttgcgaactaccttgtacttattgttggtttttgtacatctgcaaaactatgcagcctgtagtttggctactaatctttgagtatactgttctagttacaattggtggtgtgatatgctctcatgatcaacagctatacaggttgtgatattactgcatggtggatattgtttgctagtttctaggagtacttgatttgatacaaacaaagcccactttaggtatcgtggcgaatggctgtattaaagtgcgaatcatgtgtcctgagaccttacgttaccagatccggcctgcacttaattggaattgtattatttctttcgattattctggcttaaggattcccgtattaattgggttacttctatcttctcttccaatgctttgttttgatgtagctctgtacatgctttcagtcaacaactaaatttgtgagtgcctgtacattctgcatgtattcagttagctcaactaaagatataacttattctgtgcacgttcatagggttgtgtcattgtgtgcatctcagctcttcattcatcctcatttgtactagttacgtgcttctcaccagctcggcaacaatgggacacatcaggaaaagacaatagaataatctatgatagaatatttcatgttatgcacggtttcgatttcagagcatcagatgcaaacctaacaggccggacacatgtcaacatgctatgatcggttttcaccatagaatcagcacaaaaatctgcatttgttaagatagtgactgctcataggcattttggcagggaaactgtgatatgatggaaatgagatctttctacaaagcataccgtttcaaagtcaaattacaccggtttcagttaaaaaaaatcagattattacattatattgcaacaaatagtgcacaatgtttcaaaacaatggacacagaaaatactttcatgaagtcactgttcaaaatttcaaatataccatgtttgttcatcgctacaatttttccaaacttgcttacagccacagttatcaggtaatgctattaaggcaaggatttgatgaaattaacaataagatagatgtgggcatcaaaagaagggcctccaaatggatgttggcaccttctttaatcaactgtgtatcaaacccgtctggattcatagacttgagtatgactacgtcatcatgatgcctgccgagtaggattgaggacatcagaccacattatgggtactcaacaggccaatactaacataaccagtcatctgttcagccttatcatctgcagatattggaattggtgcccctgcatcaggaagttacagttagatgcatgcccaaacatgatctaacagctgtaacaatggctgaagaaaactgaatggataactacattatattcatccttcgatgcaaacagaaactatttcattggtctccagtcactaattcagtaacagttgcagtggacatggttgacataataaaatcttgatagtgttaagcaagacaaaaaggacaccacattattcagtactcatgagccactaagttttaggctagattaagaatgatgtagtaacatgtatagcacatccaagcgactttacatttcctacaaggggggatttactgaaagatagtgttgctaagctaacaaagaatatatatctttttccattagattttcttatggagtggctcactgatgttcagattccaaagccctaaaaaattagataaaacctagcactaattccagattctacgcatgaagtatctaaagtggatagaccgaaatagcaaaatgccacatcatttggaattattccattgtgaaaatgatagatccacaatcccacaaggctgaaaaaagcctttgcaatcacacgttctaaaagaagtagaagattcaagtacatgaaagatagcatacaagtagaactaataattcagtgcaaaaggttgtctagcagaaaattacacatgtaaattaacaaaaaaaaaactcccttttactcataattgtctaactttggcaggcccttactaatataactgtggtggcctcaggttccgttgtgccaactttaggtggcaatccaaacatgcccttactctatcaaatcaaataaatgagcatgtacaccaagtatgtataccaagcacgaagggagatattatctttgagatcacaggcagagaacgctccctttgagattgaagccttttattgacttccacctacaatttagctaccttttgcttcctaagctgctcatggaacttgttggttagtgacaatctgtcaatcggacaacacaggagcaagataattgtagaattcattttgtaatatcaagttagaaagatcacacccatgcaaccacatgataaagtggtagctatattacggcatacatccaaaacgccataggactctttagatgatcatcgtaaaccgttgcaatttcaggcagttgataggatccaatgtggtggcattttgcaattcgcagatcttcgtgcttgtcatacttgggagagaaagtagttatccgaagcagataacgaatgcgttgaggcaggaactccttccaaatgtccccttggtgattgtcaatcgatagatactgcacgaggcagaccatactcctgtcaccacccatatgcacaagggttgcgccaatgtgtttctccgcggtgtccacgcaaaacagcctctccttactgagcttacaagctgggggctgcccatcatcgttgtcagctgataaaacataacaggcacagatgtggccaagggtgtccggatcacaggacaacccaacctaagcatccaggtcatggtcatagtagccacgacctttgaacggcaacgcccatgcaccatgctgcgtccaccgggagctctccaagtcaaaggagaaggtggcaagaaggccggtgcgcttcttcatggaatacttcgtcatgctgaagaccatggtccgttggtcagggtgcacgccatgagagatcacattgtggaatggtggcgatggaagcgtgcaccatgaccagtcgaacttgaccttgacgcctacagcaggtccattatctcgcggtggtggtggctcacgaagcatctcgaagatgccttcgtcgatgatgaagagcttcccatccacctgcacgtaggcacaacagaatgggctggtctctgagtcacaccgaggtgaggaggtgagagtgacactctcagcataatgggctggctctcagcataatgacgctcgtcggaataggcttgcgtggcggcgtggacaacccattcaataggggaccaagcataatagtcgagcagtcgtgggctcacctatcgagggtagaccatggaggaagaggactatgatagagcttgatggtgtcgtgatgaggaaaaggaacacattgacaggaagcgaaggacctcgccagaacttatggaggaagtggaggaccatgatagagcttgagaaggaagaggaacacattgatgatgagcttgtccatgcaagaaacaactatgacatatagctattgctgggaaagaaggggtcatggtaggctgagggtcaaggatggatgtttttcttatggtgaatcacaccttattttcatcactatacacgcacacatttgcagtactagttacggtcacttgacatagtgctacattatttctgtcctcaacaataaacaatgcacattttctcgttcggaagtgtcgggatcgaggtccaatctcacccacccaaaatgcttgaagtcagcagtccatactttgccgtttatatgacatatgctcaatctaaagacggataaatcattgaatacctgagcatcatgccagcccacctaaaatacttaaaatcgaccattttctccatgatgctagttgatgatttagcacttctaaatggagaatatgtcatcctaacccatacattacgaattcagagaagaatctcacatatcactatgaattcatgataaatgagaatctaaaaatgacaaatcatcatttttctcatgcagttcaggaaggaaaccacaaaagcggcatagacgttccccttgcgagccatatactatgcatgcgaaagattttattattttttaaagatttcataaaaccccatatttattgtcaaatttgtgcaaaaccgctgatattttgtcttgtgtctcataaccatatattttatggtctaaatgtttcataaaacaccatctttatttaaatttcagttgaattcaatatatctaaaacaatatattttaaaatggtaaatagttaaaccgacaacctcaatcaagcaatcaacaactaaatgtttcatatacacgttatatattttatgtttaaaatttttagtaaatacttgacaacaactccctccgaaaaaaaaggagataaactctaactatctgatacagcagctagagtttactttttttttctttaagaacggatggagtatatatatatatatataagggtggggggttttcaaaactttaaagtgttaggtgccgctggttataatacctgtggttttatatgcaacttgcatcataattcataatgagtggggtttatcgaaatttcgctctattttgaacgaaccgagcaaataattcgtgattcgagcaaatataaatagacagaaacacccgcctttcctttccttgcgcgcactccctcctcccacccaccttccccccttctccccttccccctcacacctttcgccttcacctacacacaccggaatccgagatcccggtgaccgcgtctcgcacgcgtccccctcccttccccgccgccggatccagcccccgcgcgctcgccggagtcgccgccgagctaaaccgcgcacccgtcccccgcccccgcccaggccgagcccccgggtctccgcgcgcacgtgggggggacggcgccgacgccgacgccgcgccagatctgagagatccgcaccgacgccccccatcctcgccttccccgaggcgtcacgccagatcccccagatctggaatggtggtggtgttgttgctgctgctgctgccgtaggtatgcttaggtgagtccgtgatcctcgggactcggtcgccgcggcccgcgggtagtgggagggaggcaaacctcgtcgtcggcggcggcggcgtgaggtgctgcggagaggtggtcggggaaggaagatgcagcggaacggggtggtggaatgcagcgtgtgccggtcgcggctggtggtgccgagcccgcggagcgtgtccagggcgtacgacaagcaccgcagcaagatatcgtccaagttccgcgcgctcaacgtcctgctcgtcgtcggggactgcatccttgtcggcctccaggtgtggcttcaccctccttgtagctatatatttcattcaagtatccaaccgctaggtgtctgtgttacatgtttagccaatcccaaatactcggtagtttggtgaaatggtctgacgaaaattcctgtttatgcttaataatcatcctgagcctggagagctgtactaatgatttgctttgtatctgcagcccatcctagtgttcatgtcaaaggttgatgggaagtttcagttcagtcccatcagcgttaactttttgacggaggttacaaaagttgtctttgctatcgtgatgctaataatccaggtgtgtacttttgctgatgtttcttggtgtgcttgcattctgatgatgagtaatttaacccctataaaatgatatgtagagtacacttatagtttgtcttgatggctttggattggtaaaatactctgttagttcattagatcacttgtactcttacatgagcagcctactgaattcttctggtacaattcttctgcgtccaatttcttatagtacattcgtgtatcagaagtgattgcacatttaaaaaaaatggaaggagcagcaaatttgtgctaatcttccaaattgataagctcaactaatgcagaactaaagatcacaacaacagcctttcaagatgtgaaagcagtttcggttgatattctatgtgctacctgcacttcattatctttatgcgcaatttagcttgtcagcatgttcactgttccttgaaaatttgaagtcctacagattcgcaattgctatgctgcaacagatgtacattttatgccttctatatactttccattatgatcctacctcttacttgtttaccttctcgatgctgctttctgtgtggcagtctagaaagcaaaaggttggcgaaaaaccacttctggcacgttcaaccttcatccaggtgatttgttttctgctttcatgacttatatgaaccaccagtagaacttttttacatactcatttttaaataccttttttctttaccaataatttgtttccgctacctatgttctaacataatactgcttgttgcatgtctttttgtgacattgtctgatcatctgactctccatcattttcatatgtaggcagcccgtaataatgcactactagcggttccggcccttctgtatgccatcaacaattacctaaaatttatcatgcaggtgaatctgaagccatagttgtcgcccttctatatacccctctattgtcatcatccatgaatatatatttttatgttgtctgacatttttgagctgattatgcagctgtacttcaatccgtcaactgtgaaaatgctaagcaacctaaaggtacatattttatgcactactcaggtgttgtgcttttcttattagtgtgtatacgcatatatcataccttttgtaatccaaatttctctaggtgctggtcattgctgttcttctgaaatttataatgaaaaggagattctccgtaattcaggtaagcttgaggttgtgttgcagttatttctgactttatatatataggttgcattttgggggtaaatataaccaaatttttgtgctatataccatctgttagtcttctaccactatagtgcaatttaaagattactgggtcatgtgttcactgctttgtgttacatatcctctatagaatcatattgccagtattcggctactttgtacatagagatgctttaggagtattagtaaactcttaaataaaatcaagtgtgagagaattttgtaagtgattttgcatagtaaagctgagtctcaataaagctagcagtgatagtgaatgtttgtctattgtctttgtgtcagtttccactggtcttatggtatgtttcaaataagtctgcatcacaatgctaggttcaacttgtactttactagaattgccatgttttatcatttaatgttgatgaccataatcttcaatctggattacttgtaactcactatgttactgaggtatattacatgacaaagtgccttttgcatagctcttacgcaacattctagcatcatcaatcatgctgattttctcctgctctcttgccccccttaattttgtcagtgggaagctcttgctctacttcttattggaatcagcatcaatcaacttcgtactgtaccagcgggcaatactgcatttggccttcctgtcactgctattgcgtacatatacacactgatttttgtaagtagcttccacaccatttgacctcttaggatttccattttctttcacttcattttctcagctctctcaacagacaatatgctttaaaattatttatattctcttgcaactgtgcattgtaggtaactgttccatcattggcttctgtctacaatgaatatgccttgaaaagccaatatgatactagtatatatcttcaggtaaattacgtagtattggaaatttattgagtaatgatctttattcttctatccaactatctacttatttcgtattagctattttgtttagttgtccaagattgtattttgtagtataaggcatatgatgattcttttttttatccgcattattcttgtcttttgtttgcttcactgttctttttatatactttgcagaatttgtttttatatggatatggtgcaatattcaacttccttggcattcttgggactgccttattccaaggtacaattattttttttggagtgttatcatgcatgatcaatatttttatcagtaatcagcgtcagattctacaataagacaaccattaactgtcttatgtggtcatattcatataatctttagtgaacgccatgttgtctaatgttttgacaatcaaagcaccatttctttgacataatcatctcctgtctatttgcagggccagagagtttcaatattcttcgaggacattcaagggctacgatgtttctcatatgtaataatgctgcgcaaggcattctttcttcattcttcttcaagtatgcaggtaaattccgtgcgtacttttttttagtttcctgtgtaaacactatcatttgctgttccgcctatattattctataaatttatatcttcaaattgttaatgttataatcaatttgcagacacaattttgaagaagtattcgtcaactgttgcaacaatttttactggtctagcttctgctgccttcttggggcataccctgaccattaattttctactgggcatatcagttgtgtttatttcaatgcaccaggtgagtttgcctgcttaactaaatttcattgagacgacattttttgtcttccatatacataactgctatctgttctcagttcttctctccactcgctaaagccaaagatgacaaaccagctgaattgttagagttggaagatacacagaatcatcggtacgtttctaccttgttttaaatggttggatcatggtacttgttgccatatttttttggttttcaccttcgttctaatcaacaaatgacaaacaaggttatagtgactttaatatgtactgtgcatctagatatgtgctaatttccaaatatttcttgttgcattacctcataagatacatattatgttgcaggtcatctgaatcttcttttgtaaatatgactgctggcgctgctgaagatgtatgtgactcatttatttctaaagaaaaaaagattaatttgtgttagaacaattacattattagttgcacattatcatttcaggccagccataggattggaactgatgagaggcaaccactattgccaacatgaagtatttttttgaggtacgcatggcttctttaaccagaacttttagtttgtttgatgtggcttgtttgctttagtgactagtaatatggcacaagctaagatatgaaattatggacaagtaaacagagacgtgcttgtgcccacaaactggtggatagaataactagattgatttgcgggaattaggcagagacagactctccgcatagattaatagcggcatcaaatgtgtgacctgaatatctgatataaaaccgaagctcccattgtttgggtattgggtcataagttttaagaccaaagtgacctgataaattttacctgtaagttagtctgatatgggttccagaattagctttttgttcctaaaatggaaggaaatcatgaaatagtcagataccttgtgggtgtgatactttatctaattcatctgtccagaactaagtttctgaaaatgtatgttcttttgtttctgcaggtagtgtagaggacaattctttttgccatccaacttggaggcagcagagtttatatagcgtggcgagtgaaataaactattgtacactgtaaaggcaaagaaagaaacatcgatgtatttttcccctttgtcatttttattatcttttgtgatagggagggttgtcagctgtggcctaacgagtgtggcacaacattttttggataggcaaattccacatgaatccccagatacgatactagtataaagcaattttttccctggatatgtatactcaaatgtatcaatgagttactgttgttatatggaacttttgtactatcacactggtgttacatattgaaactagtcggttctagacttaccatggtagctatgaatggccttgagccatctcttcaccattgcatggtctgtcttttgtgcctgttctgcctggagagctggataaagattgcatataatggagatccaacaagcatttgcatagaagcgaggacttctccgtctaatttatgctcaataaacttatctgtggtgcttgctattcatcagtcgtcacatctgaaattttctcgtccttggttgcccggaccattcccccgggcacatggcgctgatcacactcaatactgtggatattgttcataggcctaagattgtgagcggatggtgcatatttctcctaacgcaacctctgcattttgtactctatccatttgcttcaactcgccaactcgcattgccatctagcttgtgatcctacgcaagcgcgcgaggcttggtgtccagtccgaatccgaaccaatcctactcggatttttgggagagtccgattcgaatcttactcggagacggtatcagccatcgggccataaaagggcgggaacgatcggcgcgcgcgcccttttgtcctgtctcgatcctgcattcccgccacacgttcttggcttcttgctccgccaccaccaggcgagagcgagcgagaactctcgagatcttcgtcaccaccaccgtccccggcgatggaggagatcatcggccgctcctccccgcgcggccacggcggctccggttccctcctcaggaagcggtgccggtcggagatggaggcggtgcgaggcctcctcaagaaggcggaggcgctggtgcgcaaggcggcggcgggggcggcggcgcgccgcccgctccctcgccgcgtcaaggacaaggaggccatgaccatggcccagaaggagcagctggtcggcctcctgtcgtcgctgccggcggggatcctcccgtcgcacgtcgccgacttcatgcggcgccggtgcagctggcgcgcggttcccggcgttgacggcgacgacgacgagctggagatcgatctcggctccacggaagacgccgcgctgttcgagctgaggaagatgctcgacgacgaggccgccgttcgccgcacgtcgccccgcggactcgaggacggcgaggtcgccgatgagtacatggacatctgcggcggcgtctctcccctgccggcggcggcgcgcaagcctcctcctctcgccttatcatcaccacctgcagccgcagagcaagaagacgatctcatcgacatctttggcggcgactctcctctaccggcgcacgaggatctcctcgacgcgtcgccgctcgtcaagccagaagccgacgagttcgtcgacatcgacggcgacacaatcgacaagtcgccaggaaatcctagctcaaccaccaccggttcgagcagcggcaacgcctccggatcatcaagcacatccgcctcctcttcaggcagcgactccgactccgacggcggcggcgtcggcgacaccgcgagcagcaacccaaacacagcaaaccatctccccgtcgtcgtcgtcgaagctgtggccaccaaaccattggagccgcagccgccgcaggtcgccgaacaagcttacaagatgggggagaagctgacccggagccggagagaagcagctccagctccggctccggccggtcggatgagcgagctcatcgccagagcgcaagcggagaggctccgccgcgacgccgagaggaagagggcgcgcgaggaacaaccacgttgatcgggatcactcatcggagtagagggcatcgtacggagaaattccggcggccggccaagccgcggcgtcggcttcttgatgagcggcaactcggattcatcaatgctgtactctgcaggtcctgcagattgtcatactgtcacattaggaacttgtactgatgatcaaagagatgatcatccatataccatagtgttgtactctgtaggtcgtagttgtaaaatcttcttttaatatatatatcgatggagatggattctaatagctggagtggacgtccactcgtttattgcatgtcaactaaatggttatgaaaaatttttcaaaaaaaaaaataacaagatagatcaatatgtaatatatcactccaaaaacatgcaagttcaaattcaacttctacaagttgtaacaaaaacaataaatttaattgtaaatatacatataataatttgagttttgtttgttatttttgttacaacttgtagaagttaaattttaacttgcatgtttgtggattgatatattacatattgatttatcttgctcatatttttttaatttttttataaccatttagatgacatgtaataaacgggtggacgtccactcgagctgttgaaatagtttcccatatatcgatgtgcaaagcttttgcacgtttataaaaaagatctcttaattacttcctccgtttcatattataaatcgttttgaatttagtcaaacctttttagatttgattgttttatggaaaaaattagcaatatctaccatactaaattagtttcactaaatgtaacattgaatatattttgatattatgtttaatttgtgttgaaaatattactttattttcaatcagtttgatcaaacttaaaaatatttaactagtaaaaaaagtcaaaacgacttataatattataatatgaagtggacggagtattgttctcacgtttgtaagagtcgagcaatttgatgtgtccggtcatctggtgtatataaagatttaatctttgcagccatttcgtgctgtaatctgcgttgttaggagcatgtgctatttttcagacaatgattacgcgagccaatttgtgcattgaaaatttagaactgaaccaaacaattttatactctgtatccgtaggctccgagcttgaggcacattggaaactttgtactgatcatgtgtttcaacactattgttgcttaatttgggaaacggattctaatctcgacagatatatatcctcgtgtacctttgtgtgcaaatagttgtaaataattacattgaatgacctccttcggtcattccggtaaaaaaaaaagttgtaaatgtatattttttaaaaatatatagcaacatttatcattccactaaaaatcaattcaaattcaatatacagttgttcatttatttctcaatgtgtgagttgagtttggaacttaaattgcatgttgcaaaaaaaaatgtcaaaatttttaaaggatttttttatagtttttaacgggaatatcctcgagagatcagcgtagtttcatcttaatccactagcaaatcagcaaaatacttttaaactcttgagggaaatgtctaattgtttgctcaaacaccatgcaaatagttataaagaaaatctcaaaatatttgacaacatttattcaatatatatacaccactccacaaaaccttaggcctaaactcaactcacacctcaagaaattaaaaataaaaaaaataacgtatgaacaaatatagttcaaatttgtcttttttacttctaaatgtgtagattgagtttaaagtttatttttagtggaatgatagttattactccatccgtttaataatgcgtgggcaatgctagaaagtcttacgttacgaaacggaggaagtactactctacattgtcaaattattttagattttttcataacaatttaaattaaatttaagagataacactacactccttcgagattttagaatccattcccgccaaatcgatgtgctaggaatgcgtgtagtgtgtttgcttgctatgatacgaattgtgtcaaacaatatttttctttgtctcaatcatatggccagtcattcatatgtgcttgacaagaatatggctacagaaaatcttcagatgagactccaagctccaggactgatccaattttggggatcccagcttatctgtagcagtacgtgaaacatagacacttaagcagcacccaaaccaaagcatgcagaaatcaaaatacgggcatcaaagtatatatatggtgttacgtctgtttgtatgtgcgtgtgtgtgcatcttccgtgtaattgtaaagaaaaatttaaatctgaacatgtcggggtttttgaaaaatagaaaatccaagtagggatgaaaacggcgcgagtatttcctgaccgctggcctgacccgagacttgcaggaagaatatgggagacaaaatgggatgctcgatattatcttagtgttgtatctgaattcgtaaaataatatgggttaggatataggaagagttgtatcttcccatatatcccatattatgaaatttgtataaaattctattataaattcacctataaacatgatgaaatattggttagtaactattttgcgagttcacgtataatattgtacaatttgctccttgatatatctcgtcttcttatattaaatatttatcaattagagatacaaatagatagtatccgtttccgaatccaattcggaggaaataatatgggatgagtgaaattttacccgatactacctataaccaattctgaatttgaaggaaaatatgagttaggatatatgaataccatgatccgattgtgcggctcgttttcaccccaaaatccaagaaataccatggacaaacatccaagtcgaagaaatgtcatcgacgaatgcgagttacataaaatgccatcatacaagcgattttacccccaaaatatcgtcgtcattagggttccgttcatcctataacaattaacggaaaactgctaaccgaaccctaacgctgatgacatttctaggatgaagtcgtttatacgataacatttcattaaactcgtacttatcatttattggaataagacgtttatcaatgatattttttggattttctttttttttaaaaaacaaagtcaaatctgaacatgcaaaatccgtatcaacatcaacagggaggttagcacagacctctgaataagtagcatgatcgtaaaaccaaaaactgcatcatgccaatgtttttagtgccagccaaagctgaacttgcaaaatccaaaatacagtagttctaaaaccgaaccctgcatgcatgcctgcagcaaaccaatgcacagttcatatgcaagtcaacatgtcctctgaattctttcgagagtgctataaccaacctatcgctaacggttttgatatgaaaatttttcaaatcaatcggccgaaacactcgcactttcaatcctccctctcgattgtaacattttggatccttttgcagccactcgagagctacaaatgacaggttcaattttgtcaggcaccaaaattttgtcagacaacacattgaaacgtgtgacgatcagttcgttataaacctgggacgaaattcccgcgctcgccgcatgcacgctcgccatgtcacgcgccacgcatgcggattccgaactaagggcctatttggtacagctccaacttttaaatataactccaggagttgtctgtagtgaagttgtggagctgcctaaacccagctccacaactctagtatattttgtgagagagctccacccaactccactcccaattttggtggagctgaaactgtttggctgagctccagctccaagaggggtggagttggagctggagctgtgccaaacaggccctaagtacgcgcttagttaaaaatcaacatcatcttggcttagtagttagcacgcgcgcttaaccctaatcaaatcggagtcggattaacacccatgacatgcacgataaaaggcgagaggcaccatgcatcgtccccgcgccacgccacctgcacgagcgtacgtgcaaactttcttccagccgccgcctctcgctctccctctcacttccgttgagacctcgccggacttcttgctgctgctgatcacacgcacgcagcgctcccaggtcccagcaatgtttgggccttactccggcggcggcggcgttccgcttccgcagatggatgctgacacctacgtccgcaccatcgccgccatgcctccgcatccgcttgcaccgccaccggactccccccgtacccctcacacctacgtcggcttcctccccgtcttcggtgatcttccaccgctcaccggcgccgtcctccaggagcccgtgccggtgccacccgagcagcgcgccgatcagccggtggccgtggccaccgagaactcggcgccgacacggccgcagctgtgcgcgccctacgacgacgaggtcgaggccaccctccgtgccatggagacgaaccccgcggagcggccgtcgccgtacttcttggagacgactcagggtgggcggatgagcgctttggtgcgcgcctcgatgatcgccttcatgggcgagttcagccggaaaaacaagctcgccgacggcacgctccagcgcgccgcctacttcctggaccgctacctgtcggtgacgcccgagtcggacgacgcgctgcagctccgccttgtcggggccacggccgtgttcctcgctgccaagtacgaggaccagtacaccctgaggaagatcgacgccagcatggtcgccgcccggtgcggctacaccagcgagacgaggcacaagatggtgtcgatcatggagaccgagatgctcgccgcgctgggcttcaacctcggcggcccgacggcgtacacgttcgtggagcacttcacgaggtactacggcgacggagaagaagagaagcagttgaaggaggcggcgcatcgggtcgccgacgggacgctgctgacgtacgggttccaccgctacctgccgtccatggtggcggcgtcgtcgatcttcctggcgaggctgcacgagctggggcatgagccgtggagcaatgatctcgcggagctgacaggttacaaggccatcgacttgatggggtgcgtgtgcgacatatacagtcaaattgcatgtcctcgctttgctcttttgcaagagtacttcttcgaggatccatagcccatgtataggaagaacaaaagagtctgtaaaagcacaagcatgcaaggcatgaatatgatggcttaaattttgcactgttgcctgtacattgatctgtaaactcaaaattgtgcgtgttatttggttgaaatatatgtgattcatcaattcaaatttataattactagcttttagtactctgatctctctacaattatggcccaaccgtggattcgtggagcacttcacccggtataacagccggggagaggaagagctacgggtgcagcggctggagcgcgacatcgccgaccagtcactgatgaactacggctgcccgcgggctacctgccgtccatggaggcggcggccggcggcgtcgatcttcatcgcgaggtgttcgctgaaccggcccgaccggtctggactctggagcacggagctgcaggagctgacgggtacagctccgaggacctcgttaactgcatcgatcctcgccatgtagaacgtagtgatcgatgaggacaccggtaggagcagagatctcttgtaaacatgttctgttgattgttcatggttgccatgcaatgcaacttgattgaggttttttttggccccctcagcaagatcctaactagagagtctttgtaaatatggcaaggaggttgtcttcatttttttttctcgaacacgtaaaagacttatgttataaaaccggtccgagatcattatcgaaaaccaaacgagaaagaaacatcataggagatccaaacacgatgacgatactgaaacacgatatttgtttacgagattcagcagtaccctacatcccagggcgctgattacgggcactcctctctgatccaacatattacgacgtattcgagttaaaatgaccctcggccggacgtcgtcggcagccgctccctctcgctatgttaagtcgtcatatcaccatgcggttacaacatttctgctcctctatttaagagaaatcatatgatagagtcgactattgctctgttcctctattttatgtatgccttttatttttctccagtgtcatttcacacattttttatagctcttttctttcatggaactgttgaattgtttatttttacacttcaattggaaatttggaatatttgctccctcagcaggtttacagggcgctgttatacgaaagaagcaagcacatcttgtgtggtaaactggtaatcattagaggaaattagatcattgttggaatttcacagctagccatttaagagaaaaaggtcatagagcatttcagattaattggatgatttggaattcaaaagaattcctcttagcgacttagcccaagatttatgagaaaatttgatccatagcacaggaaaaaacacggtaccaaaaattagcacaacaaatttttcacttcgaccagaaacacaggagaccaattttccttcgatacatagcacttcccttgtattttaagctaatggttttagtttgcagtagaaaaaattatcctcggactaatttacccttcgaccatgtcatctcgtcgttgcagccccgtgcggagcagctactgtgccatgcgcggtcgagcaaggagccaccgtcgtcgcctcgccgtgcctcgcagccatcgcatggaccaaccgcgcacggtcgaaccaccctccagccatcgccgtcgtcgcctcgccacacctcgcaagcagtcgccgccaccgccgccgccgtcaaccaagtcgcctcgcttcgcagccgcacgcggtcgacccacctgtgaggccgtcgtcgtcgttagaggtgatgctgaggccgatgacccaatgggcggagacggagctggtggtgccattgggagcgtggacgaaggggattcggtggctggcggagaagccgatggtggagaccccggctggctccgacgcgtctcgctgtccaccagagccagcggccgcctcaacgtgtcagcccgagcactgccctccgctggccacgtgcgcgctggagtcaccgccgcctcgcgctgtagcggccccctccaccgccgaagccggagggccttgctagatccggcgacggcagcgccggatctgccgccgcctagccgggagacctcgctgccaccactcaccgacaccggcgaacgccacctcccccgccgccgccatcgccgctcaccagtcgactttgccgacagtgagctctggcggtggtgaggaagggggaggggggagtgggaggcggttggggggggggggttcccgtgtggcctgcgcgtgggcgacacggggggagcgtgagggagccgtcggtctaagctccattgccctcttgcttggagaagaagggcaaataagtctttttttcatgtcaactcacatgtttggatgacaaatgtaacgggagtgctatggatcgcaagaaaattggtgccctgtgcttatggtcgaagtgaaaaatttgttgtgctattttttgatatcgggttttttcttgtgctatggatcgaattttctcatggtttattgcctcccatgccaattcgttgctcttggcacaaatccaattgaagacgacgagcgcacgcttgattgcacgggcattgccactgctggcgatgttgtctgcggcgagcacgaccacgatgctagggatactggagagctcgtggcggctctcgctggacttggcgaagacgacgagcacctccgcggcgcgggcagagtcggcagcggcgaagtaggtgatcagcgcgggcgccaccctggctggcactcacgatctctgacgcatgttctccggtagctagagcttgcagagctcgtacaacgccgtggccacgccaccggacgacgccactacggagaaaccatttcagccatcgtgccgcatctagatctgcccatgcatggcagaggtggcgacggtgatgttgcatgggaggcggaaacgactgcggtgcgcgacggtagcggaggaggaggaaaatgcagcagcgccatcggaggataggggcaaagacgatacacactgcgtcctcatacatgaatgattttgagttcctatctttcactttttaatttgtaggatcttacatcaaaatttgtgttcttctatatatctaacttgtagtaacaatgcagttaattacactcacatacacaagctcatagggggaggatttgcgtgcgtgcgttcatgggtgagtgtgcgtacatgcgttgtgagtgtctgcgttgtactgtgtgattctaaaaaaatttacactcacttacaatacactaaatttagatgttatagaaatttttttatatttacgattttttacatgtaataattttttttgttatttcacttaaaactggctacatccatttgttgaaaattctgcaaaattcgatgcttcaccatgttttgtatctgctctgtaatcctgaatatgctcactgtatttgcaacctctctagcaatgtgcatgagtacatagtagtacgatatatcatctcccatgcttaatctactattctagtggacaaatttttgcgtgacggcgtgcaattttttttttgagcgttgctcccatccagcaacttgtaccggtaggtactggtactgggaggtacagagataaatccatccgtccatgttagaagggtacgattggaaaacagagaaagtagtcgcgccccctcttctccttttcgctctttctcgtttcctccctccgtgcggcgccgctttctcatctaatctcttttttttcctcccctcggcgagcacagccccgcccgtgcgaagcccgcctgagctgcgcgcaggctcgccccaaatctgcccgccccgcatccacgcccccgcctgtgcgctcgcttgctggccccgcatctgccgtccgcggcgggggaaccaacactccttcaccagcggcttcattcacgcccccaccgttaccgatttcttatctcatccagtgcccatccatctgcgcaaggagcgacggtgccgtgggtattttttgcccctatccccctggacaactcaagcagcatatgccccctaccggtttagggtttcctctcaggtatgtgattttcttgtggtctaattttttttttgttagaaccaagagataggtagcagtttgtttgttgattttagatgatttctgagtattatgtgttttctttttagagaacttgtatgggtgatgaaatgggagacaattttataagcttagaagaacaagaggagtacagaacaatgactgccatgagatttaagacagagaaagaaggtttcctcttctataacaggtatgccaaagaaaaagggtttagtgtaaggaagaattacattagacgtgatcctattactgttgcggtaacccataggcagtaccaatgctctagagaaggacataggaaagaagtgtatatggaagcggctaacagaagtagagaaccaaaagctcttactagatgtggttgtaatgcactttttgagattaaacttgacaagaagaaaggtgattggtttgttgtgaagtatgtagcaaagcataatcatccgttggctaaatcagatgaagtagctttcttacggtcacatcgcacaattagcaatgctcaaaaggctaatattttggaattgaaagaagtgggtttgcgtcagcatcaagttatggatgtcatggagaggcatcatggtggttttgatgctacaggttttgttagtagggacctgtacaactattttactaggctaaggaagaaacatattttaggtggtgatgcagagcgtgttataaagtattttcaatggaggcaaaaacatgacatggagttcttttttgagtatgagacggatgaagctggtcgtttgaaacggttattttggtcggaccctcaatcccgtatcgattatgatgcatttggggatgttgtagtttttgatagcacataccgggtgaataggtataacttaccttttatcccattcgttggtgtgaaccaccatggttccactattatttttggatgtgctatcgtagctgatgagaaggttgcaacttatgaatggattcttaagcagtttctagattgcatgtatcagaagcatcctagagcactgatcacagatggggacaatgccatgcgtagagcaatagcagctgtgatgccggattctgagcattggttgtgcacttggcacattgagcagaacatggcaagacatcttcgtcctgatatgctttcagattttcgaacacttgtccacgcaccatatgatcatgaagagtttgagagaaagtgggtcgagtttaaggtgaagcataaaggttgtgaagacaaccaatggcttgtgaggatgtacaatttgaggaagaaatgggctactgcgtacactaaaggtttgttttttcttgggatgaaaagcaaccaacgtagtgaaagtctgaattctaaacttcataggtatttggatcgtaaaatgagccttgtccttttggtagagcattatgagcattgcttatcacgtatgaggtatagggaggctgagctagattgtaaagcttcacaatcaatccctttcacttctaatgatgctagttttattgagaaagatgctgcccgtatatttacacctgcagtttttaagaagttgaagttggttattgctaagtcgatggattgggaggtgatagattgtatagaagaggacaacttggttaagtatgttatttccatgaaaggtgattctgagatgctacaaatcttgaattgtacatatgtggaatcaacaatgaagagcataaattgcacatgcagaaaaatggatcgtgaatgcctcccatgtgagcatatggttgcaattatgcatcatttgaagctcgatgccattcctgaagcatgcatagtgcgtaggtggacaattaaagcgaaacacatgtttccttctgataggtatggcgaagtatatacatggtcaaaccagatggagagatatcacaggttgcgtagcatgggcacggaagtgtttttcaagtgctcggtgtctaaggaaactactttaatggtgatggagatgctagaaaaattggacttagaaactgatgaatgtgagacaaagaactcagatttgtctttatgtggtcatgtgctagcgcaaagtttacgtacagacattgagagtcatgataaggtccatgatcctatggaaattgtgcctaaaggagctccaacaaaaagactacgaggattcatggagaagcgtgttaggcgttgtggttattgtcgtggccatgggcacactgttcgaacatgtccaattttcctaaggtgaaatataatatgattattttgaatatgtcaatttatgtaaactctctctatatattactaatttgatctgtgattttattttcagcaaagtagaagaagatgtatgagaagtatgaagtgtttctttgcactggtggaagttgaatctggagtttgaagtgtttctttgcactggtggaagttgaatatgccttgtttgggaagttgtattgttggtcagaggattatattgtgtggtctagttattttgtaatgaacaattcaatctgtcatggttcttgtaatgaatttgtgtgaaaagcacaagcttttgctggagaacaaagcatgtatatcgttgaatggagcttttgtcttaattactgtcagctgtgaacagagcatacattgtttattgtttgtctactagcaccattgtgctgtttttactcgaactcctgtgaaatacatgccattctgtggagtgatcaaaaggaccagaaggtggtaacatatctcaatacatttctattactactatgagagtacctaagcattactaatattttgcagcactcatcccaaacaaaagaaattccaaaaactgataatcaaaacgatggaaagaatatggatcataaggtgctgctattttcttatcttgtaatatgatatcactattacaactctaatcccttccaaaattaacatttcagaattctcatcaagcattcaaaatcacatgcattcctgatatagggatagctgaagctccacacatcattgaaagcgatgatgatagtttgtttgaaaaaaacatggtatttcaattaaaattacaaccatgacaacatattaaattatttagcaatgcagtaataattatataattgatcctatcaggttgacacaatcggtgcaaggctgagacgtccacatggaagggttagcaagccaactcacagatcagacagtccattcttatactacaaaaaaaacatttgcaagtgctctaaagagaagtaaggaaccaaaaactacagaactgagcttgcaggatgagattaccatcaattacatgaagcaatgtgatgatgatgaaaaattgctatcaagtattgatggcatacaacttacatatgaatttcttaggccacttgtcaatcccaaagactcacaaatcataagcaagtggttgaaaggcagtgtaagaaatacttaacttcttccatacaacgtaatattatcagtatctaaattttgttctttattctttcacaggtcatagatgcatacattatgttgattaaagacatgcaagtgaaagtccaagagagcatggtactgcatttctagaaagtacagcacattgccaggcctggaaaacaaatggtgaacaaattggaacccgcaacaagcaatatcgagacaagagagcaaaagttacagcaaaatatttgcaacatgatatggtatatcaatgtcctcaaatatccttcataataataactgcatgacttacatttcatttcctatgtagattttcctaccactcaatagaaactcaactcattggtacgtggctgttctcaatggtgctaaagaaaaaattcaaatactagactcgatgcgcatggaaaagagctactacgacaaagataaagacctcaataatacagtatgctacattgtgcctttagattcatcactattccttactaactttttacattagatatgtaatactctatttgataactcagataaaaggaattgaaaagtttatccagtatgcaaggctagaagatggcgttgaaaacaaatggaagaacaccaggattaccaattggccattctgcccaatgaaagtccctcagcaaagtgacaagtcaaacaaacagttaatttttgtcgcaaattatctataacgaattaccacttacaaagaacatgcttgcaacagctggtcatgtggcttgcacacattgaaattcatacagcattggaatggaaaagaactctcccctgagttcaatgaaatggtaattttaaattgcattcagtactctttgtaaataaaatgacattaattgatattttttcataacttgcttttcaggatacaaccaccactttcaaacataaggttgtagccaacctcattaattctactatgaacgaagtgattgaagtgcagcaagatattaaacgcctagtgaccgaggcaaatgtaggcaactagctctaggctaagattcatatagacatcattgtaactatccatgattaaaacaagcaactcatcagtgtaccactcgttatgctatcaacaatttctttcttctatcctattatcattttgcagtcactcattgttactatccatgatttattttgaagtcactcgaattgcaatgtaatcagtaaatgataggggagggtattgaacatttgaaaattcacatagaacaagcaacaactgagctcattaaaacatccaataaatcgtacaatacaaatcctataagcaatgaagaagaagagcatatgcagcccagaaaatgaaagtatctaccgctgcaaccaacagaagctaatgatttagattagatgaaaaaaatcgatgcatacactgccacgtcgccggctaagaagactacacgaccacctcgccactgcagccgcgcaaagcccaaacccgctgccgccacaacgccggttccgacgaccacctcgtcaccgcggccggcaccatcacgcacgccaccacctcgcagccaaggctgccacgcaccagccgccgccgccacctcgtgaacgcggccgccaccaggccaccgccgcgcccgccaccagcagcaccgcagcaccaggccttcgccgcgctaggcatcactgcgcccgccacaacctcgccgccacgaacaacccgctgccgccgccacctccgcctcaaatggattagatgccaccgccgcctccgcctcccacggagcacttcgccgccggccgcctcctacagatcagccgccgccgtcgcctcgcctcccccgccgccgcctcgcctcccacggagcacctcgccgccgcctcgaacggatcagccgccgccgccggctacggatcagccgacgccgcctcctcccacaaagcaagtaggcgccgacagaagcaactcgccgccgccgccgccatctcccacgaagcaagtcgccgccgcctcccacagatcccgccgcctcccgcggatcaactccaggccgatgaagcaagtcgccgacgccgcctactcctctcacggatcggatcggatgggaaggggagatttgctcgccgcttactcctctcacggatcgaatggcaaagatttggtagaaaaccctatttccctcccctggacacttctacgcgaaaagacaaaattacccttccaccactccaaatattccggtaccacctcatgggcaaatttgtacctggaggtaccacagattttccatcatccgattgagctgattggatggctcaaatttcgtaccggacagtaccgatggtacctgctggatgggagcaaatctctttttttttttcgcgtgaccgtgtgtgtcagtctatgtaatatcgtatgatcgatcggtgaattaagctagacaataatttcatcgtgacagagatcgagtcggagatgcaaacaaattaaggaaagaaacacagatgggagaagcctaattacggttttacgagcgtacggcgcaagctagtacaacttcaaacacacgcgcttagttctaatcaaacatcattagttcgatcctgattcggaaaaccgcgcggattttgaattggatggattccttcacgagtgcgcagcctgatcagagtcggatcgtggcaggaggataaaaggcgagagcgcaacaccatccttcctcccgccaccaccacgcgagcgtccaactttcttccgccaccgcctcttgcctcctctcgctctccatcgatctcacttccggcgagaccatgggggatttgatcttggatccctacatggaggacgcgatcttggatcattcctgcctcgccgaacttcttgctgatcaaacagctctcccattgttccatccttactccggcggcgccactccgcagatggtggataccgacaccttcctccgcgccatcggcgcactgcctccgcttgcaccgccaccggcagctccgctcgcaccggcgccaccggactcgccccgtacccctcacacctacggcagcctcctccctgtctacggtgatcttccaccgctctctggcgccgtcctccaggagcccttgccgctgccagaaggcagcgatcacccggtgtcacccaagaagacgatcgaggtcgcatcgctgctgcaagagcgcgccgatcagccggtggtcaccagcaactcagcgacgacgacacgtccgcagctgtgcgcgccctacgacgacgacatcgaggccaccctccgtgccatggagacgaaccccgtggagcggccctccccgtacttcttggagacgacacaaggtgggcggatgaccgcactggtgcgcgcctcgatgatcgccttcatggacgagttcagccggttgcacgagctcgccgacggcacgctccagcgcgccgcctacttcctggaccgctacagctccgcctcgtcgcagcaacgaccgtgttcctggcggccaagtacgaggaccagtacaccctgaggaagatcgacgccagcatggtcgccgctcgctgcggctacaccagcgagaccaggcacaagatggtgtcgtgcatggagaccgagatcctcgccgcgctcgactacaacctcggcggcccgacggcgtacacgttcgtggagcacttcacaaggtactacggcaaggggaaagaagagaagctgatgagggaggcggcgcattggttcgccgacgggtcgttgctgacgtacgggttccaccgctacctgccgtccatggtggcggcgtcagcgatcttcctggcgaggctgcacgtgcgggggcatgagccatggagaaaggatctcgcggagctcacggggtacaagccatcgacttgatgggctgcgtctgcgatatgtacagtcaaattgcatgtcctcgctttgctcttttccaagagtacttcttcgaggatccatagcccatgtataggaagaacaaaagagtctgtaaaagcacaagcatgcaaagcatgaatatgatggcttaaattttgcactgttgcctgtacattgatctgtaaactcaaaattgcgcgtgttatttggttgaaatatatgtgattaattcatcaaattcaaatttattagcttttggtactctgatgtctctacatatggcccaaccgcggacacgttcgtggagcacttcacccggtacaagtgtacaacagccggggagaggaaaagctacgggtgcatgcagcggctggagcgcgacgttgccgaccagtcgctaatgaactacgtacggctgcccggggctactatacctgccgtccatggaggcggcggccggcgggcgtcgatctccgtcgcgaggtgttcgctgaaccggcacgacgcgctggtctggagcacggagttgcaggagctgacggggtacagcttcgaggacctcgtcagctgcatcttcgccatgtagaacgcagtgatcgatcggttgatcgatgaggacatcggtaggagtagagatcccttgtaaacatgtttctgttgattgttcatggttgccatgcaacgcaacttgattgaggttttttggccccctgatagagagtctttgcaaacatggcccggaggttgtcttcatcttcatcttttttttattcacaaacacgtaaaagccttataaaactggcccaagatcatcattagaaaccaaatgcgaaaaatgtcataggagatccaaacacaatgacgtcattgagagtcgtagcttatatccccgaggcactgataacgggtacacatccccgatccaacatattacagcgtatatatcagagttacagcaacccttggccgaacgtcgctggcagccgctccctctcgctatgctaagtcgccatgtcgccatcctgctacaataggtatatccctttagtatagaatccgactcttattctactcctctattttatgtatgcctttatttttctccggtgtcatttcacacatttttgtagcatttttctttcatggaactgttgaattgtttgtttttacacttcaattgggatttttgctccctgatcagcaggcttacagagcgtcgttatacaaaagaaacacgtcacacatggtaatcatcagaggaaatcagatcatcgttggaagataaattttacaattcttgagaaaacaccttgagatagctaaattttacactaatttttttttatctttagatagatagtacgtaaagatactaaattttacactaaaaaatattatacctttaggtaagataaaattaccattgttggaaatgttggcgattctcgcggcgtactttcacataatggccagctatattgactttcacattactttcgctatgttgtgttgcattggactgcatgtgtgtatatagtgtgtgtgtcaccaatatttggactgtatctgcataatgtaccccaaagataatttcttggcggccctagcatttctagccgccatggaaattactcatattacaccccaaatatattcttgattgccatggtaggtagggccgccagggaaagacacagttttggacatcaataagttattcttggtggccctgactgacaaggataatctttcttggtggtactaaccgtcaaggataaaaaatgtccttagcggttctaacggtcaagagtaagaatttttttggcagtttctcagcagccaaggaaagatatatttttgttggtctaaagggacaaggttacatttcttggcgcatttgaaagttcacaactttcttaatttgcttggtagttcgaccgccaagaagatattcccttacggttagcaaccacggaatctgaatatctctagctttctagacttggcggtcagccaatggaataattaatcttggcgattttcatactatacttggcggtttttggccgccaagaaaattacggatttttgtagtgctagctaatgcattaatttgatgcttattattttccctatttatgttgcatcttaaggcaattgatttgtccattgatcacaaaccaatcattggaagtgaatgtgagaattgcaagagcaggacaggaggacgagtattggcgaaaaaaaaaatcctgtcatgggcccagaaggaagagtcatgcgaggatggggcgtgccgcgtgttcaaggactaattacatatgtgtccagactattggtatactcttaatcttatttctttctggttatttgtacataatatatattgcatcagttgtaattggtgttttctttacttccatttcaggtttttttgaattaaagcagaacaaaaatattcttccttcacagctgatagtgacatgtgatcctgtagctgaatttggccccgtactaacttgattaagatacaaaattttcctcgatttccttgattaagattcagctttttggtgttcagttcatttctgaattctacttcagtttatacatgagctgtaagatgatgaaatgtttctgggaatgacatgtcctcctttattttggatccatcaagaccgctgctccttgtcactctgaacaagcatctgaataagcatcaagaacgaaacaggacagcattgagaacattggaatttaacaggagccatttcagagaaaaatatcatagagcatttcagattggatgatttgggattcaaaagaatttctcttagaccaagatttattgcctcccatgccaatgccaattcgttgatcttggcacaaatccaatcgaagacgacgagcgcacgctcgattgcacgggtgttgccactgctgacaatgttggctgcggcgagcaggactacgatgctagggataccggacagtggacagctcgtggcggctctcactggacttggcgaagaagatgagcacatccgcgacgcgggcagagtcggtgagcgcgggcgccgccccgcttgcacacacgatgcgatgcatgttctccgctagcttgcagagctcgtacaacgccgctgcggagaaaccactttagccattgtactgccacggttcaaaatttcggatcgaaatttcagttctattggatctcccagtatgatattattttggctgaaattttttatttatttcatcttttcatgaatttagtaacattttgtttaaatttgtatcaaattttatttaaaaattcatataatttcgggctgaaattttcaaaattgcgatattacggccaccccgctaaaaatgatcaaaccgaaagattaaacactgactaccactagatctagccatggtggaggtcaggacgacgacatcgcctgggaggcggaaccggctgcggtgcgcaatggtagcggaggaggagaattcaacggcgccatcggaggataggggcaaagtcggtacacaatgtgtcatacataaatgatttgccctgcaacgtcatacattttgaatcgttttagtttaacttgtagcgtcatacataatagaatagaggtagtactacgcttacgttttgcctgagatttacctgaactcgcttaacgcacttttaccattgtccaggaaactcctttaacggatttgttgtttcaactgcgacataattttgggctcctatctttcactttttcatccgtaggattttgcatcaaaatttgtgctcttctatatccaacttgcagttacacttaattacatagctcttacactcaattacagtacaccaaaattagattttgcaacattttttttctttatatttacgattttttacatgcttgtcttttttttatgttatttcacttaaaacgagctacattgattggttgaaaattctacaaaaatcgatgctataaatctaccgaaagattaacaggtagtttctcttttagtcactcgattggacgtccaccatgtttttgttctgctcagctgcttagaaatcctgaagattttgatagagtgttagcatatgctcactgttaggtaacttctctagcaatgtgcatgaatccataatagtatggtatgtcatctcccatgcttaatctaccattctagtggattttaagaatttgagtgcttggacttctttttgcgtgatgatgtgctctttttttttcgcgtgtgtgtgtcagtgtatgtataatagtatcgtatgatcggtgaatttcatcatgacagagatcgagtcggagatgcaaacaaaggaaagaaacgcacgcgcttagtcctctctaatcaaacatcattagttcgatcctgattcggaaaaccgcgcgaactttgaatttgatggattccttcacgcgtgcgcagcctgatcagagtcggatcgtggcacgaggataaaaggcgagagtgcggcaccatccttcctcggccaccaccacgcgaccgtccaagtttcttcccgccaccgcctcttgactcctctcgctctccctcgatctcgcttccgggctccggcgaccatgggggatttgatcttggatccctacatggaggacgcgatcatggatcatccctgcctcgccgaacttcttgctgatcaaacatcgctcccaatgttccatcctttctccggcggcggcactccgcagatggtggataccgacaccttcctccgcgccatcggcgcactgcctccgcttgcaccgccaccggcagctccgctcgcaccggcgccgccaccggactccccccgtacccctcacacctacggcagcttcctcccaatctacggtgatcttccaccgctctccgtcaccgtcgtccaggagaccttgccgctgccagaaggcggcgatcacccggtgccacccaagaagacgatcgatgtcgcaccactgctgccagagcacgctgatcagccggtggtcaccaacaactcagcgacgacacgaccgcagctgtgcgcgccctacgacgacgacatcgaggccaccctccgtgccatggagacgaaccccgcggagaggccctccccgtacttcttggagacgacacaaggtgggcggatgaccgcactggtgcgcgcctcgatgatcgccttcatggacgagttcagccggttctacgagctcgccgatggcacgctccagcgcgccgcctacttcctggaccgctacctgtcggtgacacccgagtcggacgacgtgctgcagctccgcctcgtcggggccacggccgtgttcctcgccgccaagtacgaggaccagtacaccctgaggaagatcgacgccagcatggtcgccgcccggtgcggctacactagcgagaccaggcacaagatggtgtcgtgcatggagaccgagatcctcgccgcgctcgactacaacctaagcggcccgacggcgtccacgttcgtgcagcacttcacgaggtactacggcgacggaaaagaagaggagctgttgaaggaggcggcgcatcggttcaccgacgggtcgctgctgacgtacgggttccaccgctacctgccgtccgtggtggcggcgtcggcgatcttcctggcgaggctgcacgtgctggggcatgagccgtggagcagggatctcgccgagctcaccgggtacgaggccatcgacttgatgggctgcgtctgcgacatgtacagtcaaatcgcatgtcctcgctttgctccctttcaagagtacttcttccaggatccatagccaatgtataggaagaacaagagagtctgtaaaagcttatgtcaaaaaaaaagtctgtaaaggcacaaccatgcaatgatgcaatgcatgatggcttcaattttgttgctagcgttcgtatgtacatcgatctataagtccaaatttgtgagttttggttgaaatatgtatgattcatcaaattcaaaattactaacttttcgtactctggtttctgtacatctttatcgatcgatctgtaccgtttctcttcttcctactggtctactgcatgtacatgcattcgcgaactcacaacttctcgtgccacctgccacgtgatagatggtggtatctgttgcactaggatgcagtacacaacggctgaaccacctagtcgagcttttttttttttaacaaatcggtatttaggtgcgccaatttcgttgagtatactgggatggaaaaactgtataggaagaagagatttacaaaagaaaaggaaaaggaaatgggaaagtattttctaaaaaaactaaggattgatatgtgcaaggcattttgcttctactagggcccaagttttagtgtcctcctttattttcgtaacgagggatattgtcaagagctctatccatatctctcatgccgttagtagtagcagagtgcaaacatctttcctggatgtcctaggttaggttgcaacgccataccctaggtatggactatagcaggaatccagctggctgactttatgtgctcttatgacatctagtttgcgagcatgttccagattcttctcatgtatctgcagaccacgaggaggtggaaagcagtctccaattcgtgtctgcagagcagtcaataagtgttgtttggacatccttaatcggagatggattctaattaatagcttgagtggacgtccacccgtttagatggttacgaaaaattttcaaaaaattgacaagatagatcaatatgtaatatatcactccataaacatgcaagttcaaattcaacttctaaaagttgtaacaaaaataacaaatttaattgtaaatatacatatagtaatttgagttttgtttgttatgtttgttacaatttgtagaagttgaatttcaacttgcatatttgtggattgatatattacatattgatctatcttgttcatattttttcatttttttcataaccatttagatgacatgcaataaatgggtggacgcccactcgagctgttaaacagtttcccatccttaatcactaattttctaatgtccagtccctattgtggatcacaagctaggtgaacaacttacatttgtttggtgcctacgctttccggatgattgtacaccaggtatggactatagcgggaatccagctggctgactttatgtgcccttgcaacatctagtttgcgagcatgttccagattcttctcatgtatctgcagtccacgaggaggtggaaagcagtctccaattcgtgtctgcagagcaggcagtaagtgttgtttggacatccttgaatcactagtttgtctaatatccagtccctattacggatcacaagccgagcgaacaacttacatttgtttcgtgcccatggtttccaaatgattatgtcatagtttgtgctagtggattcaaggaactactctttttaggtggaaccgagtattcttcatgatttgtgagcctccaaatgatttcatctacaacacctggggagagttgcacgctttgaactgttgtccacaaggtcactagttgctctagaagcttagttgacatgtctccgatgattgagagatttaggtcttgcgaccaggtattgtctgtgatggtatccctcaaggttctattcttccctttggagattgtgtacacttgtggcatgacatccttcgggtggcgaccgtgcatccaggctaagtcccaaaaatgtgatgttgctccgtccccaatggttatcattgtagttgacaagagtattttatcggtttcgtcgcacagggtatccaagccgacccatgctttgtccagggatttccattcataccatagccatctgacatgtagtgctagtgcaaagctttctagatttagcacgcccaggctgccgtaggcagttggcgagcacattatactttgcatttcccgctcgttatgttttcctaacccacccataggaagctctttcattgtttgtcaagcactttatagggataccttggtaaatttaagcgttattaggacatagattggctgcaaggaaagcacttacttgacttgagtggtgcgtctagctagccccatgtttctttcccaccaaacagccatcgttcctgccaatttatcgaagagtggttggaggtctgccttgagcaatctaccaacggtgaaaggtaatcccaggtatttcactggtagtgacgcatcaccagtatgttctccaatacatcatcgagatctatattctcacacctgatgagtgtcatctgcgatttttggatatttgtacaaagtcgagctttcggagccaagtgttttatacggattgaacaaagtttcggagccaagctttctgatattgcttactcccaataatacatatttctttttagataatggaatgtaacattccggcgtttactcaaagagttacagccaattattacagaactcacacagaaagttcacgaaagcagaaacaaagctaagcaaactaatagacaccaacaaaagaaaaagatcctctaactactgaattctaatagagaacctccacccgaagttggcaaatagatacataattgtcgtctcaagtttacgacattcatcatttattagcttgatatcttcatcatgcctttgcaactgagcccaaccctgaagccaatacattgccctgaaaagcacctgcaaataggattttgatggtgttttatcaaaaaccatatcatttctactaagccaaagagcccaacatatagcggaagctccaacaagaataagttttttgatttttttactaacacccacaagccaattcccaaacatatgagatatactatgtggaggataaagtccaaaagagaattgtatagctctccaaagaaatttagaaaaaaggactcaaagaatagaatacatataatctacggcgttattagatagacaaaacaaactgcccatgtattttctctaacttgatttttggatgagatttacaccaatatttagcttgataatgatcgaattcacattctctatatgctctgatcaaatccagtaaaaatctgcaggagtgcactcacgttcaaattgctctaatcagacgaaaacttaatcatgttgttggcagtttggcaccattcaggactaactgatcaattaatcattcttaagtaattttgttcatcatatataatgtctctaccgtgttccttagagaaatatatgtattttaagaatttaagcacagttgactttttttttggtgtgttccggtgtatatggaatggagttagtaatatcctacccaaaatagtattgatcggtgaattaatttacagcgctagaaatcttgatggatttttcttgcgctcgtgtttgagttttgatgactccagaacgatttggaaacattaacctgatacccaattttcttgtaaccaaattcacacggacgccaaattaacccaaagaaaaaagaaagaaagaaacgctttcgtaagtcgatatactaattcaggactataaacaatcaactaatcatcattaagaaattacagctatccgttaatcccatcaggaattcgggacagagtcggagaccaaaataggaaaggaacacaacctaattccaggtttttttttttacagcctagtacgagttcacaccgattcgcttggttcaaatcaaatatatcagatcaatacgatcccgattcggaattgcgcgcgaagcctggcctgaatcggatcgaacacccatggtggcagccaggataagaggcgaggagcgcagcgcgacaccatcaccatcgcctcgccgccagtcgccaccagcgtgtgcaagtttcttcttccaccactagcctccgctctcccagtctcccacactgctccggcgagcgagcgagagcggccatggattcgatcatggagccctacgtcgccgaccttctcgctgacgacataacggcctcgatggtcgagctcttgcccggcgacggcggcgcggcgcagatggatgtcggggttcttgacgcgtacctccgcgccatcggcgcgctcccggcgcatccagcggcgcccggcgccgacctggccgccgccgccgaggtggagtccatggcatcgaatgatgacaccaacggcgtactctacgactgggacacgaaggtggatgtcaaggtgccctgtgcccttcttccgccgccgccgggcttccctccgcttcccgttccagggctggccgacgagcccgtgtacgctgcgcccgctcgccatcttcctccgccgccgggcttccctccgcttcccgttccagggctggccgacgagcccgtgtacgctgcgcccgctcgccgtcttcctccgccgccggggttccctcccctccccgttccagcgaaagccgagcccgtgtacgccgctcccgtcgacgaaggcgacgccatcagggcgttcatgcagcagctggagtggagcgagcagtacaacggcgacaacgacgctccggcccccgacaactccacggcgtcgcgcccgcagctgtgcgcgccctacgacgacgacatcgacgccaacctccgtgacatggagaaggacgccgcccagcgcccgtcgccggactacctcgacacggtgcaaggcggtcagatcagcgcggcggcgcgcgcctccctcgtcgcctggatggggaggctcacccaccgctacgaactcgccgccggcacgctccaccgcgccgtgtcctacttcgaccggttcctgtccgtgagagccctgccgagctacaccgcgcaccagctcagcctcgtcgccgccacggccgtgtacacggcggccaagtacgaggaccaggggacggtcttcaagctggacgccagggagatcgccagctacggcgagttcgcgtcggcgcaggaggtgctcgcgatggagagggagatgatggcggcactgggctatcggctgggcggcccgaacgcggagacgttcgtggagcacttcacccggtacagcaaggggaaggaagagctgcgcgtgcagcggctggcgtgtcacgtcgccgaccggtcgctggagagctacggctgcctgggctacctaccgtccatggtggcggcggcggcgatctccatcgcgaggtggacgctgaacccgccgggtgcgctgccgtggagctcggagctgcaggagctgacggggtacagctctcaggacatctccagctgcatcctcaccgtgctcaacacgcagtgatcagccagtgatggatggataatagttacaagaatctggcaagaaatgtattttttgtaatttgtgaacacattggcaaaaaaaatgttacattgtgtcgttcacaatcattgtctcagaaagattgcttctagatttatcaacctgggttcatatggatgtacaacaaatgttacagtttctttgtaaccgtgcaatgtttcaatttcatcaccagtcccctaatttagtcgttgcgtttcattcatcaaattccatcatcgatcgtcttcctagctagagaatgaaattcaaacatcggtcatggcgggagcaaggatagatatctctccagtctccactagtcgactatcatgccataatgttgtgctaatccttgtatagttttaacttctctctctctgttttttttttttgggggggggggggggctaattttgctataacaacttttacactatttaatcaagagaaatgaaacaatatcagctatgtctccttttaggtgatattcagaaatgaaaaactacaactgggtatatacacttgaaccaatcaagatgaaaaaaatgacttaatgttatgttactatatatgcatgttaacagaaaaaaaatgcaaattaatcagcatcgaagagcatagcagaatgataggcgtagattggttttgcacctgaatcgatcgctggcatcctctattttatactggtggtctagcacggtttcccctgcacatatccaatgcatgtgctacagcatacaggccagagccaccgtgcggcatgtttgaaatgccaaaattttgcaaaagaaaaaggaaatgtttctgcaagagtttctctaacttatcactcacaacatctgaattaacgagacatttctccgtaaaaaaaagaattaacgagacatgcattgaaaagattaaaaccatgttaaagctagatattataatggaataatctatagtaaaaacttttcaaactggctacagtgtgcacgtaaatatttggtcacacgaaaaatataatcataattttgacattacaaaataagggaagctgtattgtactattactgctctatccaacttctactcccgacagggtggtccacgatgattttctttacaatggctgaaagaaagtgaggtttcacgatctaatttcatatttctaagatgcatatatattgattttaatcttctacattcattcatgatgtttatcttataaaaatctaattagcttatgaagtatgctaaatcatacagtatttatcatttgatactgtaaaatctatagttagtccagcccttttttcttctgtcaacatactgtttcatccacaagtctacttattgtaccggcacatatactctttgtcaaaattcttgtgctaggaaatagaaacttaggagcaacaaaaataccaaacatcccactgctatttaacaatgcaaaatggatagtatagtactggctacttcttctaaagtaggagtaattgacattaattcatcctatgtcccaactctaaataaccaattgtcaattaatcatattttcgttgcgcaataatagaccatgaccaaaatcccaacaacagttcccttcgaaattccaacaacagtaaaccttaatgtgatattcacaactttgttcaacaatgcttgtcactaaaccgacatcccaaactctactaaccgatattatagccttttactcacaatttcaattttgtaatatcagcgaggtaccaacatcccaacctaaaaaaccatagcgtgtatcattactcacaactccattctgcagtaattggtatcaaaccaacatcccaacccccaacattggatagtacattcattattcaaaatttcattctaccacttctgcaataaaaatcgcataaaaccgatatcccaaccataataaccaccagtgcgttaaacgcaaacattattctgcaataattaaagtgaaaccgacataccaatcctactaatagatattccgttagtactcgcaatttccttttccggtaaacgacaacgaaccgacatcccaaccatagtaacggatagtctattattattcctcgcggttttcttccgcaacaagtagcatcgaacggacatcacaaccctaacaacatagagcatgttcctcaagagcataaaagtataaccaaaggggacttgtgagcaagagcaacctgagctatatatatagctagccaacctcaccacatagcagccacgccactagctagctaggccagagcgttggtctctccatcttcgtcgtcgtcggcgacatgggccagtgacatccggcggagccggctcttccccggtgcccgccacctcctccggcggtggcggttggccatgtctatctcgccgcggcgcggcatcccctcctgcgcccgcacgaaccgccgcaccagctcgtcgttccacagcgactcgccgccgctgaaggagaccctcttcctcggcccctccacggccgccgcagccggcgccggcgccgccacggacaccggcgcagggtgcgccctggccctgctcgacctcggggacgacgccgtccgcggcgatgcgggagagcggcgaccgccaccaccggcggcgccagcagtaggggacctggccggagacgcccgccgcggtggcgagggagagatagcggcgctgctcctcgccatcatcgtcggcgccacggcgtcgacttggatgcccatgatcccgtcgtaggagcacagcggagcgcatatgcacacctccctcgcgaacgcggcggacgtcgtcttcagagacgacccccaccaccaccttggcctcctctccaccgcccccgccacggcagccgccggcggcggcggcgcagctatggcggcacgtcgcgccgacgggatcagcccacccaacgcccgcctgtaccacggctgcttcttggcggcggcgtcaccattcctgcatcaaaacaagcacacacgcacgaagagatcaccatcaaacacgtccacaacgacagatctaaggatcataattctcaaaaggggaaaacgagatatttttctccgtgttcttgaggggaaaaaaagagaaaggaattttttttgtgtgcgaacacatatgcatatgacgaacaccttgggcggcggcgctgcgcttgcacggagtcggagccatgaagctgctgcatcatcgaagcgaactcgagttgggaaatgaaaaaaagcaaagaggaaatgagaaaaaatctgcctctgcctggtggtgtgtgtttcgaacaaatgagaacaccagtttctactactcgcgaaggaatgatttggaaggggggcaactctgctggcacttcatttagcagttggcaacaaaacatcggacacattaatgccagattggttttcaatcgcgaattcactccttggctaatgcggcgtgtgcatgcgagcctcgcgaaatccggttgatacagtgggatattacgagagttcatttatggagattttgttcatcatcactggggatatatagggtcagactgagagagagagagagagagagatgtgctcacctcggcatttcgggtatggacggatggtggcgtgtgcagtagtatgcccgttacgtttacagaggtgctatacttgcgtactttggaccaaatggaacatatcttttttaaactagagggggaaaactgggacttatctttttcaaacatgtgaaaatatatagaaggcagaaacgaaaaagaaaaagggaaatttgaaagcagatggcagaaacgaaaagaatggaaattgtgaaaacagaaggcagaaatgagaaaaaaaaacgtggtcggcaggattcgaacctgcgcgggcaaagcccacatgatttctagtcatgcccgataaccactccggcacgaccaccttgctgacaatgcgttccaataaattttatagattgttacagataaacatttcgtgacaacccctgtatggcaatatggcatgggtatgggttgagaagtagacttctatccattgtgatttgtaaaggactcgatgtcggagccttgtcactgaaccggccggtggtgccttcggttcaccagctgagcgcattgactcgtgcattgccgcccgcggttgcacgtattttctgcggctgagcctgcctgcttgcctgctggtcatcacacatcaggtaaactgcactacttcagtagtgcctcgtaatctcgtcggcaaaatcgcgtgaaaccgatcgaggggcaggaaggcaaaacccgcaaagcaatgaggtgtgaaaacggtcacgaaaattaccaaccaaccaaagctcatttttttatttctaccaaccgagtcatgtgaaaatggtaaccgatgaaattaaaaaaatatgcaaacaaaaatagaaatgatttcgctgttatatcgactgtttctttatctttatcttaccgtattcttgcgaaaattaccgtttttataatatggtacttacgatatctctagataccctcaatatgtacggtttttctctatttgatctaatgaggcctgttagctcctcaatcaaatccctaacttaagagcaaggctaaaaagatacttcctcaatcctcaaatatttatcattctactcgttaaatgtagatagtttagtatagattaaggtttaaaaataaatattacaatgttcctcattaaatgatgtatggttgggagttgactaagagtagaatagggacaaaatttaataggaggtgatgtatgggataagtacaagtattttagaataaattttgaatcctagaaagataattatttttaaacggaggtagtatagtttacaatttgaaaatttgtagggtacttgagaaagcacatttatatcggtttccgatgatccgatcgattctgacatgtttctgtttgtacaattccgcttcagagtcctcaacattttttataccattttcctttttggttttcagaaaaaaaaaggttacgaggatggttgagctgtttttcgacctttcctcgaccgtttccaaaaaagggtgaaaacggtcggaatcgatagcatctcttcggaaacgacgttcgatcggctagcaattgaccatatgtatcacttaaactactcaatgtcgatattaatacagtgcataaagaaaatagaaaaaacaaaaattaaatacagccataaacagtaacggtaaaaaacgttactcattatacggaacggcgctttttcgtgaccatttctacccctgcctagtgagcaccacatcgcttccacaattccacagtatcgcgtattcgcgtgcccgcgaccgcgagacgtgcggccaccagaattgcacacatacgcagggggtttggagttggacccggagggcaaggtcggcaggatggcccatatcggcttcacctgcggggctgcgggccgcgccgacgctaattcggctgccgcgcggctgcgcctggaccgtcacggcccgcacgcgtctgtacaacactggttcgcgcgtgtggatcggtacgtggtgcggctcgcctcgcctgctcgtccagcgtggcggcgtccaccgcgaaggattgcgacggcgtgcgtgcgtgcgccggatgacattgtaatgcaagtgcgacgcgatccgtccaccgcgcgcggtgcgcccgtgaagtcggggccgtttcgactgccggcagatatgctgtcgctcgtcggtgtcggcgaggtgctcgcgacgcgcgacggtggcgttggaacggacacagcacagtagctgcgatcgcgcagggccggcatggaggaaatgactttttttttagtttaattaagcaggaggagaaacaaagtttttacaaccatacaacatccaaggttttccctggagaaaaaaaaagggaaggtacagaagtttaagaaaatttagtaatatatttaatatttaattagttttattaaatataatattgagtatattttaatagtatatttgttttgggttaaaaatattactatgtatttttatagatttaaatgaatgaaaaaaaggtgattttacaaaagttaaaatattttataatataaaacggagagattagtaatgattgatgaaagcaccatatacccccccaaaacaattggactctccgaaaacgtacgtgccttttcttttcttttccgttcttcttcacctgccaccatctttgctcacgctttacagctcgggcagatcccggttatctctcctcctcctgatcgagcctcaccgctacataaattaagtcgaaactcgaaggtgacaagtacgtattgattaacgaatagcgagtgtcccacaaggccacaactacaagtctagtcgttccaatcattgcaatattaattgcgtttcttaatttgctagctttagctgaaaaaaaaattgctatgcatgctgtgatgctgctatgatcgcagctatttgcgtggtttaatagaatgataaagcaccaagaaatgcaactggcaaagtatcaaactttggatgctacggccggcgcgcttataattaattccgcatgatgaagtggctttgagttgcacttcaatttgccgctctcgatcatgaacttacaagctcttcattctttctgcttcgtcgatctagccgtcccaattgttcaattgtttgcgtgaaatttccatgattcaaacattctagatcagtgctatttgcgactgtgttaatgtcttgtccataatattgggcattggccattcctgtccaatcactacagtacatgtaggtctgtttggatagggctaaaatttttagtccctgtcacatcggatgtttgacactaattagacgtattaaatatagattaatgataaaactcattccataactctagactaattcgcgagacgaatctattaagcctaattaatccatggttaggctatgtgatgctagagtaaacatgtactaattatggattaattaggctttaaaaaattgtctcacgaattagctctcatttacgtaactagttttataagtagtttatgtttaatactctaaattagtatctaaatatttgatgtgacaaagattaaagtttagtccataaatgcaaacattgacaccgaatatttgctttgctgaggaacagagaataatggtgtagaagtatcgtagtggcaggcttgcaacaatgcaactattacatgggaaaagcatgcagagtgcccattccagaacaacctacgcacttaacagagtaacgtactgagcggcaaaaagccagcactgtagcaaaatacgacaacaacgcccagtccacagttccacacaacactgcgccccgaatcgcgaggtgtagctagcatgtgttcttttaccccttttccaacttctactttttatttcagaaaaaaatgtttcccaaaccactaaatagtatattttgttaattaaaaagtatataaaaattatatcaatccattttcagttttttagctaatacttaagcagtgtgggtttctaacccctcaacataacacaacattaaaaatcaaaatactggcacctacaaagctgaaagtgaacaggacaaatagtgtccgtgtaacaacaatcagttatcaactatggaagggtgcgtccgagcatgcatatgccagcacgtactattacataggccgagtttagttccaaattttttcttcaaacttccaacttttctatcacatcaaaacttttctacacataaacttttaacttttccatcacatcgttccaatttcaaccaaacttccaattttagcgtgaactaaatacagccatattctctatatcaaaaattttgccctctaatcattgtagccttgtgcctttcggctccccgggccgagcgtgtccttccgctcgctctctcgcctttggcaatctcactagctagtcagtggtagcgtgatcaccaaccgcgcggttgcaccacgctacgcttgggctttggctcgctttaaatgcgtgcagcgccccgcacgaaccgagctttggtttttgcctcgaggagtttgccatggaggctgcggggctcagctcgtggatgcggggttttctcctgccgtcgctgtgggaggcggaggtcgccgtctccgcggccgcgctgctcgtcgcggcactgctcctcctcttcctcgaccaggcggtccagtccagcaccaagtccccggcttcctcctcgtcgccgccgccctctcctaccactacggcagccgcgagctgccgccgagacggtggttgtggtggctgcggctgccggcgccggcgggcgaaggggaagccagcggccgctgaacttggaggcaccagcaaggtgagccacattatatttgtttgcattgcacatttgcacttccttcttaattatcagaacaatttgtttgcattgcaggttgctcttccagatggtagccctcactctcggggcagaaccagctatgtgatcaaggtacttgcttatattatctgcaaggttaattgactccatgtctgaattgtttccgtgtgcctttttctgtttttgcaatcagctggagctgctctgtgccaagtacctcatcggcgccaacttgaacgggagctccgatccttacgccgtcatctcctgcggcgagcagagacgcttcaggtcacctgccattacaacttctctgcgctatgcctcatcttcacacagtattttgttctaatataatcatgtctgagctaaaaaatcattctaaaaagcaagcatggcctaatgcgtttgcagttccatggtgcctagctcaagaaacccgttgtggggggaggagttcaacttcctggttagagagctcccagttgaggtaccaacagtttgccatgttgtgaattcgaatttctgatatgtttctcaattgcattccaagtttctgtgtcacaagtgaaaaggtgatgcagtgtccatcattacaattccattatacaccaagaaactctaatcatagtgtctcaggttgcccccaaaaagataaaatagttaatccagctttaatccagtctgtttttctcatcttaagcgtgcgagaaaagcaaaaacgtatgagtgtgatggattcagattagacaaatgctatgtgaaaaacggcacagggtgtatgccagccttggtccctgatacaaagctatacttttgcactattgtactagtactacttttcatccttgctgattagatatttggatccttcggccaagcggtatatattgctggctgcctggcttgcagctgagctttcagaattgtagcagaaagtcgcatggtaaaattctcaaagtcactttgctttgtcataatcatgtggcagatttcttcccgtcagaaaaatggtggtccaaataacacagcataattggcgaccagctgagtagcagaaattatgagtagcaagcagaacaataaattatacttgctggtgcatatgctttgcattaccttgcacgtgcagcatcagctagcttctctaatgtgacatttgcagttttgcactgctcctgtcaatgattcaaaagtaaggtttagcctagaaaaacattgtactacaaaagaatggaaaggccgagttcaataaaagtttccattatctaaaataaaaggatggaaattaagtactccctccgtcccaaaatataacaacttttagcccttagaatttatcccaaaatataacaatttaacaacttctccaaacattctcttctcaaccaatcacaaccctccatcattcacttttcccacctacctccagtactcatccaatcataatcctccaccattcacttctacctactttcttaataaccgtggccaactctaaaacgtcttatattttgggacggatggagtagtaaaaatctgagtagatacaattcccccataatatttcttacccaacagctgtgactgatacttacaatgaaaccgttcaaaagatgagctccttttaacatttgatgccgaactttggttgcctgcctgatatactcttctgtatataggtaaccataacaatgtacgactgggacacagtgtgcaagtgcaaagttattggatctgtaactgtagccgttctcggtgaagacgaagcaggagctacttggttcgacctggacagtaaatctggtcaggtaaagtgtaaaattgatgaataagtgatattgtctaacttaccactattgctgtacttcaaatattcaatgaacttttaaggatgtatttacaattaacgaaatatggttgcagatctgcctgcgttttagctcagctaaagtatttctgacttctgagaggtaatcttaatcaggaagagggggggggggagggggggagggggggagggggaagcagcatacctgatgataagcaatcttcttattttcctttttcccctctttctccagtctgtttgaccaatgtgttggaatcgagtccgagagaacgatgatgctaagcaagcaatacctgccaataactcaagatagtggccttctacaagctatatttgaacttcctcatgatgaagtattaattcctgatattacaattgcttatacagtatttcatactcatcagaattgactcttcctcatgatgattcatgtttcttatgctgaaacattccatctgtctcttgtacttccagattgttcaccaaagttattcttgtgctctggagaggtctttcctgcaccatgggcgtatgtacatctccttatggcatctgtgcttccactccaatgtattctccaaacagttgaatgtaaagtacatggatctgaagaaacatgcattgcttaattattttacttgaagctgaacattgttatttatgctcctttctagttatctccatggtaaatcaataacagcatggaaatattgttaagtaaatttacacacttattatcccttagatgattttcttgagcttattacttttattttgagaacttccagttcgctttctaagacctgcaattttttaggtgattattccattacaagatatagatgaggtatgcaacctacgaagctctttccgtggacttagtatttgctttctatcagctgagatagtagacatccacatcactttatcccgcagataaaaagaagtcagcattcccttatcaacccagcaattactatttttcttcgtaccggttcaggtggtcatggaacacccccttcatgcagtcaaaatggtaatttattggctcaatctcataatttttaaaacgttggattcaagaaaatgcctaaattggaaaagtagtttaatatcatagaatcgaattaccacatttgtgcaagtttgaactccagagagcttgaactgtatcattttcaagttgagttactctaaaagaagtggcttttaccagtaaaagttgcgctagcaaagaaaatcataaacctaatagatactccctctatcccaaaatataacaacttttagccctcaggatttatcccaaaatataacaacttctccatcaacattctcttcctaaccaatcacaaccctccaccattcacttttcccacctacctccactactcatccaatcacaaccctccactattcacttctacctactttcttaataaccgtgtccaactctaaaacttcttatattctgggacggagggagtatacaatttagattaactattcatgttagaaatctatgtagagattttctgttgaaaatacctggcttgatttctcaggaagaatcaggtacaaattcacatcattctggaatagaaaccgcacatttcgggccctggagaatgctctgcagagttacagggcaaccttagaagctgaaaaacaggtatccagaaattattctagcttgaatattttctgttgattttgcagaaattatctgagcatctgtaatgctttcctacaaacaggtcagaatgcattcacttcaacaaagaagaagcagcgatgtcatctgtagcaaaatagatgacctaaagacagcagaaagaagcattgaacaagcaaaagcattccaacctttcatcaatgaacatgttcttgtagatgcaaccagtgtgagcatcccaagttgttttcctacatattcaatgcacaatttgttatccctttcccccctaattttcaacatgacattgtccatcagaaaaccttccctggcacatctgagaagttcttcagtatcatattaggtgacaattcaatgtttttccagcagtatcgacatggaagaaaagatacagatttaaaggttcctattttgtcagtagcaccaatcgcatgttctatttgctatgtcaatccttggatgtgttaatctagtgactggtagcataaccaacatttttttaatttatagtgttttgatttttcattctctagcttagcaagtggtacccctcagatgagtatggcggcaagatccgcgaagtgatgttcaggtctctatgccacagtcctttatgtcccccagatactgcagtgacagaatggcaacgtgcttctttctcaaagaacaaaacaaatctggtaagattaaattagtaacagataggtccactgtgaatcaggttttcttgatttttcttctttaatgaaattatgacttactatctcatttcagatctatgagacaaagcatcaggcacatgatgttccatttggttcttactttgaggtatttgccaccattattgacaacacgaacaaatagaaatagaaaatttgaaatattagaaagattgtttggtcaggaaagtagtaattttgtgagaacttgttacttgcttctccgtttctatgtcttttcagcaatcttttctattgtctaagaagttaatatagtaaagtactcattttgcacaatagatactaatgctaatgaagaggagaccaagtggcccgtctttaaccatttctttctctgtataaaaccacaaaatattcactcttcccagtaagatgtaattatttttcctgagagaggaattgccattgataccttggtcatagatccactgcaggtggcatctaagaacaacctccagttcaacatgtcaagttgatataaagattggtaagttggctatacattgtattaagctaaacttttgctagcaaaagatgtttctgttaaatattacattatgcttatgcacattataggagtaaacatgaagaaatggtgcattttgcaatccaaaataaagtctggagcaactgatgaggtatgctaatactatcttaaggtggcctaaaatgaatatgagactaggaacacattattctacttcaaatttcacaactctatggcataaaaaaagggatgaacaatagttcagaattctaacctcctgtgtcacttcgtaaaatgatttcaccagtcaccaaagttcccagacttaagaactccttgatcttaatgccgtggaaaagcagtcaccaccactgaaaaattagatgcaagacaaatgggtgataacaattgattctagggcactctgtaccacaaagccctctaattatgcaaccatatggtaacagagacactttaaagattttgtttcccctccaaaaacaggatttaatggtttcttcttgacatgatatgttgcagtacaggagagaggtttgcaagattttggaagctgcctgtgactatgtcctaaaagaagagtcaaacaaccaagccagtcatgaaattgaggcaatatctttaacatgaaaaactgtagttgtaaacccatgtgtagttcccaccgacagatacttccagcacattgaagaagatggcagatgatccaaatgaacttcatctccacaatatatatgtacttactgcatgatacagaaaagatcaaacactgttacttcaaactaacaaaagaattcaagagaagctgacttttctaaaccttattttcttatcgtacatgaacaacacacagaagtatggtaaactgtaaggaggtgctaattattatttacagctactaaagtatgacgccctggttttttacagtaacactataatcacaacatcacgcattcacacttctttttagccgggatggccgaaggatgtattcacactttccctgacttaaactcgctttcaagtttcttcagctttgtctcttgcactttgagatcctgttcgagtttcttgatctttgcttcttgctcctttgctgttagagtgagggttctgttatctaaagccccagagagttcattcagtgactgggcctgtaataagattgaaaatagtaattaatccagatatcctatttgggaactgattcatcagaaatacatgcatatttcccttaataattatgggtaacaagccccagcgggattcaaaaattacaacttggtgtaaacaaaaatatacccactgcttgcgatatctagaattgtcagagccataagctcaggaaattaatctgagtacagacaaccagttgcttgtttttcagacgaaaaaaattgcgtgtgctctagcccaactgtactcattctctgtctcaagtcaatgaaattcaatgcagtcctccaacaaaacgagtgaaaaaaggtattccatacttcgattgtcctgggttgccttccgataaaccatgggtattatttcattagttctacaattacatactgcttctagctgttgagttgaatacttgaataattgttaatcctttattctctaatcttacactgagcagatatcaagctaaataggaaaggagggtaagctataagcatagttcaaatatggcttcaaagggtacagtacaaataatactaaccttctcaaggaggtgtaatcgttgattcatatcattaacaaaagcatcatgtcttgtagttagttcaagaatatacatcagatggatttgaaggcgctctgaacaatgcttatcaagaacacactgcggaaaggctgattcacagccaacctggtaaaaagggcagttaataagcttcatagggcaaactgatgcacaatgcctgtccatctcacaccgcataacatgctgctcgcacaactgctcacatggtaggactttgaatgggcagacagagtcatgcttctcaatgtgattagcagaaaaggaagctaaacatccatcatttttgcagtttactatcctaaatctacacagattcctgtgttcagccagcttatcttgtgtgtcaaatctctcagggcaatggataatgcatttcatgtctatactcttaagaatagtccctgcagtagcctctctaacatctggtgcccagaagttctccatctccagcttctgtatgaagtctttaattttgttcaagcgggtttcgctagacaaaaacccagacacatggctcaacaagttccgttttgatgctacaaaaccatcgatcaagtctgagaggaactccgtcggcatggtggatgcttttattaattgttctgagtgatcctcgcctccgtcgacagcctcacgaacaagcgtcatggacccctgaatcaaatattctgctagctcgctcttcattccaacagctacagaagatgggctcttgaagatatcaccagtagtgctgtcaactgaggcagttgccaatccacgaagcaggatttctgccatggaatgcactacatctgaatcacacaggttgcactgaaaatttaagccatctttcccaactgtgcattcaaggttctccattgtaataccaagcagtagttcaaatcatcataacagtcttctgaaaaggtccaatgaagcaaaccatttatgtacttagtctagtatatgctcatgcattcttataaagaacatacataaaattttcaaagcaatgaagcctaaaacttatgcaggtaaggttctccaaagatgcgtcactgttcaaacaacacctaaatggcttctagacgtggctcacaattgggctgcacatcgcctagtcagaagcgtttcatatgaatcaactatctagagatcaataatgccactgccagcaatacagtccatgcacaacaaaaccaattccaactactataggcaataggctatagcacaatcaaacccaattactccaatatacaaatatatgaattggtcattggaaaaatctagaactgaatgagatatttggcaatctagcacttcacatcccacacatttgacatgattgctttgcacaacgccaacgaaaatgtggagacactgggatacggagtagcgagtaccaaataacaacacaacaccaacgatgcaaggagccaaaaaacggaagttgaaaactggacgaaacaatccatctcctatgataatagcaatcgaagactcaatcggcgcatcggacgaaacgggaacaccgccgcacacctcgaggatcctagcaactggtaagcgaagcgacgccggaaacgagaggcggacagaaggctacgcgccgtcgagaggatgcggaggaggggagggtggttacctccgggagcaggaacgatacgcccgcccagcccagcctcgagttcgcggccggcgatacggcgccgcgcagcgctggagagtcagagacctcgccggaggagagcgcgtcgcgtcagcgccacggggagggggagagagaagaaggcccacgagaagaggaggaaggaaagaacaggtcatcaatggactcatgggccgcgtggccgtccttctgtagcccatccagcccatctggaccgtgcatcgtcgatccgacggcccgtggagcgaaaatggatacggcacggtgtgtgggggtgtgcttagccgtcttcttcttcttcctccggcaccgccgcccaccaaaccaaccaaccaaccagccccgcctcgagccaagcaaaaccctagcaaaggggaggggcagcgccggcgggggcgacggggcgtgggggcgacggtgcgccatggacgcgatccggaagcagctcgaccagctcatgggcgccaaccgcaacggcgacgtgcgggaggtcagccgcaagtactacgaccgcgacgtctgccgcctcttcctcgccggcctctgcccccacgacctgttccagctcaccgtgcgttccccgtgctactctcgatcccctcgcggcggagccccctcctatatccccactccatccatcggattcggttatcgcgtggctgatgtgcgcctgcgttgttttgtttttttgcagaagatggacatggggccatgcccgaagatgcactcgctgcagctgcgcaaggagtatccttggagatccccttcaaattattcatgtagggtaactagggtttagtatgtttcagttagattttgtgtgtgaatagaaatagatttgtgccatgcaacctgcttgacggtttagtttgaatcggagaagcggagtgctcagccgaggtggttctaaggcgagagcgacgaattagacattttatcgatggtgtgggatgtttggtctgcgatttgttcggctaggatggccttcaacgcatatttagtaacttttggtacttctaaatttttttagatgtgggccatgtggcatctatatttatggagttgattgtgtttacttattgctaacattaactgttgtgatgcttgagtatgctacaacaatttggtgtataaggtttacattctgaaagatttacgttatgaataatattagtgatgtaattctattttagtgcctgccagtgcctggtgacaagaaccggcattcttttaagcgttagatcatgccagctgtgaatatttttcctttttggcttcagtcacatgttacccttttcttttcttgccaaaattaaatgattcgaggtcaacttgagaaaaatagaagattcttgaggaattattggtaaaagtttagatttagtatggttattctcaaaaccagaacccatagaaagtgtttggcctgttcggctgttcttattggtaaacctgtgacacatgctagtctgtactgtatgtttgctattgagtgcaagagctctgttctatttgtttcctgaacttagtaatagatatgaagaagcgaaagccaaaggtatggacaattatgaccgtgaattggaagaaactatagaaagactaatatcggagtgtgaaaggaagattcagagagcccttaaacgtctagaggaggacgatgccaaggcagctatagcaatttccatcactgaagtcacacaggtatattcctttataatagttagttctccttgggtcccacgactgtggagataaactaagttgcaatatgtatgtacaaatgcagagtaaagaagtgattgagttctccaaacaaatcaaggagaagatgaaggagattgatgcttttggtaaatctgatgtttacctttgttttgtttgaaattccatcatggccacatcctatccacttgaattgaccatatctttattaatattttctcctgaaaattattcaattagagagaatgatgcatcatgttcatgacatattcgctttaactctttatctcattcaacaaggaaatgtctctagacaaagaagatattcggaaaaatatgtgtttggctttttgcatggaccaaattggcttctgcctaattgtgtttaatcaatggagttttttaaataagcgaagtcgaaggaactaaactaaaaatgatcctaagaatgttttacattcatacaattgctgaaatcatgataaaagtatggaaatttgacctccgtaatcaaaatgaatgctttatattttttttcataatttatcaaattattctttattgtgcctaatgggatagtattgatttaggaaaaattaaccaattctttctcaaatattttttgcttttccccctcgctattttgtttcttaaatctttgactctttgttactcaatctttctaactttgcctgccgttgtgaataatttccgagtacactacataaaacaactccttttgttctcttgagtttgattgtatcaactgtctcttcctctagatcttgagggaaacactgagggcaaaattcgggctactgaagaggttgacaagctcaaggaacagagggctgaagagcaggtattgtccctgtgatcaatgatcatgaaatatgtgtaccacaatggagtttgtgtagtgcgaggacttcatatttttatatgactaaatttattgccatcatattgctttatatacaatggtttgccaccggaagattacaggcatattagtgtttgtataacttttcataccctttcaggcaaagcatctacttgaagcttttaataaggaccgtgtctcactaatgacttcactccaaactgctaatcaatcaattccaccaccacctgttgctgctgctccagatgcacgcacacaagaaatgattgatgaaaaactcaaaaaggcagaagaactaggtttgattttttttaatcatgctccctatatattccttccttgaactaccaaagcacatggctcattgtcttctgttcatcgttaatatacaaaaattcattaatttctagcttccatattgaacaggtgagaatggaatgatcgatgaagctcagaaacttttggatgaagcagaagctctaaagaaggtgatcgaccttggcttttaattttgttggtgcaactgattagaaatttaggaataaatcctctatggtcgttatcaaaggaatagtgttccatatctctcttatgtgttctgttgtcatgtttaaacagcttggtgctcggccacagcctgttccggactctgcaaagatgtcaactcacgttcagattgtaagtgtggtgaatcgctcattgcagtgcacataaaaaattgatatatttagttgttttgttttcactccaagaaattatcactgtgttgaactgtggatgcattttgttgtgatgcttttatattgatgatttttatttttcaatctctgtttagactgatcaaaagttgcgcctgtgtgacatatgtggagcattcttgagcgtatatgacaggtaaatttatcctttttaacttcaccatcaatttctgcatgggggtcatgaatgtacgagaattttggggtttcaagtgcttcagcttttgacgaacacctgtaactccttttcaccagcaggcttttgggtccactttttcgaggattacttttgcagctaaagaatgtgcgtgtttattttatacatgtttatccttgtggattatagatatcttgttaagaattctaataaattatcacaatcttttacataatagcatgcgtgttgtttacaattaatatcttagcttacaattttcttccaaacagtgaccggcgtttggcagatcattttggagggaaacttcatatgggttatatgctgatacgtgagaagttatccgaactgcaggtgaggtttttcgaaattgtgctattttgaatggagctaagtccggtggggttgcatgttagacaagggcctttttatgggaacagtaggattgtcctactggaaaacagatattaataataaaataagtctaaaatatagttcagaggatccaaaggttcaaacgtcaagtcacaaagagagagaatagagagggcatgataactgatcaactgactaagctactaagtagataagaaattagcagagaagttaacttgcactacaaacaagatttgcctggagaattggttgtcttttacgaggttttggctaacatggatatgtataattaaccttttttgtttgttcctgaatgtgctttttattggagatgaagatgtggttttttttttaatgcttaaaatgtgtacaggaagagaaaaacaaaaggcgcaagatagaccgagctgagcatgagagaaggtactctatattttagaattcttaagaaaactaagattaatagcaaaacaaaattctttcatatgtgtggcactaaaaacgttccaattttctctaatataactaggtccagggacaggagcctggaacgtgacagagcatctagcaaggatcgccatagaggagatcgaggcagcagccgtgatagggacagggattatgaccgcaggagaagccatgatcgataccatgacagagaaagtaggtcggacaaggacagagaatcagggagatcccatagttatgattcaaggggctaccgaaggtcacgctcccctagggaccgttccagagactatgatcgatacgggtatgcttacatttacttaatttgcttatcagataaagttggaattatgcaaaattaatttctgttatattttactaccgcgctaaaacaaagtaagtcaactgaaggcaccaggttcattatgataattcaaaatttctcaggaaaaatatagaaatatgttcttcagagatcaaagtgttatatgttcttcaggaaaatattgggatgtatatatttgtgtagagttcaatactaacttccattctgtgcattatgtattatatgaattaattaaattttctagtcaaggtacccagcaaatgtgtaattttcgtatgtctttttttttgttatttatagaacaaaaactcttcttacttagcactgctcagagttctggtgaagtgcatctgactttgattttctgtcactgcaggcgtgacgaccgtcggcatcgacgctagacacatggtcgagggttttagcatgaaccggatcgtttggtgtttcaattcagaggttcatgtgggaaagatgcttatttcctgagtatatccatttgcactaccaccaatgaacatggaactgatgtaatagctacgtgaagttaggattctagttgatgctgatcatgtacaaccaaaattgtgttaaagagttgtggtatgtctcagatcatccaaatttaaatttgaagatatcctctcctcttgaaacccatttgttcattcggtgaatcggggtggtacatgatacatccggtaaagaagggatgggaattttcacatagcctgatttcctgatatatttagccactgtggacacttgaggatacgtttaactcataggaggcatattccctctgactagctaattcttgcattccagattgaatcgtagaattaaacattaaaatccatgaaaattcttaaataccaaattaggacgttgaatgcaatttgtagctttacatttctacctctgaaaccatgattcagatgtacaagctgtccgtgacagatgagtcttacttcaaagagactttatcactgacatgtgggacccataaaggttgggtccacccatcagtaacatacgtccctctgactttacgtcagagaagcgcgatcggtctgtgacactggagccgtggggtgaacaaatatgtaaagtcagagaagcgcgatcggtctgtgacactagagccgtggggtgaacaaatatgatacagtggtacgcaccaacaaatagaagaattgtaacatcctgaagatctatatacagaaccctcacaaattagatattacacttggaccaatctgttcgttcttggtaagtggtaacagaacatttttcgcataacatgagcgtctgcaatcatgctgacaggtttgccagaatgctgatagcagcagcagcagcagcagcagttcagcgtctaacatgatcagaaggttcacggccaagaacacacgctttataactgcatgctgtaaactgtatatagtcacagaatcacaacttcacaagttagaatacggacggacaggctttggtcaccctataatatgcccgcatatcgttctcgcaatgcttgttagctcattatccgcttgattttgtcaatgcaactgcaaaatgacaagtgtaactgtgtaaggggtgtatgttatgtgttaatgtgggggtgggaataatccgactggcccaacacgcgtggccacgcattaggaataagttcactttagatcctttaatttgacggtaagttccattgtaaattttttattttattttaaccggatactcattgatatgtaggggtgtaagtgggtcagccgtaaacccacttataggtcaaaataagcgagttcgcggcttattttaacctataaataggtttcgcgggttagccacttacacccctattgatatgtgggtctcaccatttcttatgattgtaagtacaagtgtaccacataaacaccacgtcagtcgaaaaccgtcatccaagctattttgggatcaagtttatattggttttaaagttaaaagatgtgttatatatgttattattttggtccagagatgaatttcagactcagtggctggacctaaaatgaacttatactgcacgcgttgcaaatctgaggcagatcggtgcggatggctgcaggtcaaagttggactgcttgagcagcttggcaagttggcatgcggcgtaccatcacaaagagggatgtgagtggagatgatcagccatgtgcgtgagtggccctgtgaccgtaccttctcttctcggctgccctcgcaccgccagccggacgcggaaacggagctcaccgttaacttgccgaacgtttccacttggatatataatcctggtcttactcttacgctttcgttttcaactctcgtcggcaggcccgtcctagccaaattttaacttttaaagattagcgttgagcagttttctttttatcatattttgttttctaagtcgctaagagcaagtttaataatatagtccactactagctccaatttatctatagccaatctaatagtcaattcatacaatagttgtttactataatattaacatatggtatcacctgtcatacacatattgtgtattggagtctgtgctacagctggttacaaatctgtagcctgctgctcttctctcttatcgtttatctcattaaaatatgtttatagctggctaaaagcctattattatacctgctctaataataacaccgtaagatatttttttatcataaactattttttttcttgttcgtatttctacgacttagccgtaacttaatcagtcctagtttgtcataagcgtctgaagcttcgctattacttctgctagacgtacgactctaacatgcagccatagattaactaaaggaaaccgttgatcaaatttaatcatacgtaagttatatggttgggtcatatgcatagtaatttcctacttctatatgttacatattttaaatgcaaagacggtatcatacgatattatatttctaaacagctgatcaaccgtatttaagaggccctgcatttttcaagaaaatggaccgcactaatttttatgacctctggtgctatattaattaatgttttgaacaaggttgagattaaacttttataactttgaccatcattaactttgaatatatttagtttaaagaaactagaaaaacatatatagatttttctttcaaaacactataataaaaataaacatgcatttatttattgtatatattataatagaaaaataaggtcaaaggtatatcttgtagagtatgtcattgtccaaagcgtcattaaaatgaaaccggagatagtagatggcagatctattaatttggccatcctcgacattgtcatccatccatggtccaaactccgtttttaatttatttttcaattcttgaagactcatttgtttgtctttcttttagtttgactgttcgtgttccaaaacgaaacccgttaacagtaacgacgagcagagtacaggcgtataaaataatacggtgctagctcatgcggcgttttgagaacctaaaaaacaatcaaactaatagaccaccacctatgcggggccatgtgcacgggcgcaaggtggtcaacggcaaaccgggcccccacgtgaaaatggcccatatgcgccatgcgcgtgtacgggttagttaattccggtattgtatcgcggcacgaaatgcgtaatctgcgtcctcctcgtgctctgctccggccggagaaaagccacacctccctaggcccctagctagtcccgtcgtcgggcgccgtaaactaacaaaatcccccgtcctccgagccgcgacgacgacgaaccgctcgtacactacgccgcctagcttgcccgtgttcgcgctcggccaactccgtggcgccgcgcggatgcaactactgcgctgcaagtgtacgtacgtactgtgcaaacagtgcaagcatatgcagctaggtgcaacgacgacgacgaccgcgcggtcgcgtgatttccttcgatcccggcgccgtcgccgccgacgacctctacagtgtccaaccgtactgcagctactatatgtgctccgaatctacagcgagccctgcaactggacacgcagacaacccagacacactcgctgtagctactactctagctcgtttagtttggttgaaacggcagtgtgcattttaataggcacgaaatctgtagccttggtttcatgtactcgatcgccatgcatgtgcctcagactttgctctcgtgaaaagatgaggggagttggcatcctcccccggttttgttttcgcgctacaattaatacgggcgaactcacggatcacagaaccgttgtatgccgacaaaacactcgagtttttataacagatctaaattaatggtctactccactccgcaatcaaacaaaatcaataccggagtagttcatatatctgtgatagtgacagtgtgaccttgtgtgtaactgcaaggccaaagtagcgttcggcgctatagtagccggaacagttaattagttgcattgctttggtgcatgcagagctatggagtcggcggcagcacggacgacgacgacgtcggcgtccgtcttcgtcttcctctgcttgctgttcgccgtggcggcgctgcagtgcgccgccaccgtcgacgccgcgaggcagctgcggccagcagctgacgacggtggccgccgggcggcgccggcgttagtccagagccaggacgcggcggcgtacgccacgctgcgtgagaggtcgccggcgaggtcgacgacgacggtcatggcgtggacggcgcagctcccggccgggccgagccagaaaggccccggtcactagctaattaagctggagatgagacgtgcgtgcatgcgtatgtatgtacgtgcaaggggcgaagataagagagctccctttgcacgaagaggttttttccccatggtttcgtgcatttggaagaagctgtcctgtcgtcctgatcgggttctgtcgtttttccttttttttttctttttttttcttcggtttcaattgcttctcttcctttttgtagtgatccagctgcttttttctgctggaacaatgtgagaagcttaaggttaccttgcctattggagtaattgtgatgccagatccatctttgttctgtttttaacatgcattatatttcgtttcactcgacatatatatagtacttcctccgttttataatgtaagtcattttagcatttcacacatttatattgatgccaatgaatctagacatatatatctatctagattcattagtatcaatattaatgtgaaaaatactagaatgaattacattgtgaaacggaggaagtacgtatttttttttagaaaaaagaaaaacttattaacacgttttagtagtagtaactttatgctattgctatatagggtcgacctttaaatttggcacctatttcttcttggcaggaattcaccggcaaaagctagccgaagttaacgcgacaaccgacaactagcagataacttggggttgttgtttggttggggccgtatgttgaggagcaggagattcctgctcacgaaatgcttgttgcactttcaaagttgacattagacatgcatgtagataagctgccataatagcacaaattaacagtaggaaagcaaagttaaccggccggtgaacgcaagttcaaataaaatagccttggctcagtgttcatttcgagcagcgaccggcgctctattctgaattcgagttgggccatttcgacattccctcttccatggcccatttgaatgcgctgaattttctgggctcgagttattgggccaattttttttttttttttacaaattctttcctctgataataactctagttctagctcgattgaacatgatagtgaattactccctccgtcccaaaatataagagattttaagtgaatgtgacatatcttaatacaatggtaaggaaacacatcagcttttacaatactacaacatcgaatatatatcactgaaaaattgtccattcctattgtagaaaaggtaaaactagcatggtatggttttcactgtataactaaatcaccgtcatgttggggatggcggcggaagaaggtgcgagacggccatggatagaaaggtgccctctgccgtgcccatcatcgttccttccgtcgagctcatcgccaagccatcacctctggcttcgctctctgtccagggacgaggaagggggaaagggcggggtggtgatctcatcgagcgtctcatgcacctgatgcacgcgcggatgtagcgcgctgcatcaagcggggcaagatgagttgtgaagctcgatgttagagtgcgttgcctagcccatctattgtgggccaccgatgtcatattggacctgctccaccacaggtctaaccggagtcacaactttaggtcatgggcctacacaacccgaaagactttgtgttgtgtaagcctaagacctaaagttgtgactccgatagacctgtggtggagtagacccaatgtgacatgggtggcccataatatgtgggccgggctgcgcactctaatactcgactcctacctttatgctcagcgtagctgggaggacacttttgcatcgtctcgtcctagctcgcgggctagtgcatgactattttatatggcctaatgtgagtcaggcttcgtggatgcaaccaaacaccccacaactaacaaaatacatatagagaaattgtagattatagccttataattgtaggaatgatatacgaatttttctttagataatggaatataacatcccggtctttgctcaagagaactacagccaattattgcatattagcactcaaacaagagtgtagttcaacaaatcattgagaacaccccatgaacaaaataagtaacgaaactaaaataaggagaacacattattgaagtctatttgtgaatctccaactataattgacaaaaagttgcataattgtcgtctcaagcttgcaacatgtaaattttataaactctctgtcttcttcaaacttttgtagttgcgcccagtatcagagccaatatgttgccctgaaaattacctgcctataagaaatggatggtgatttatcaaaaaccaaatcattcctgctcaaccacagagcccaacatattgcagaagctcctacaagtacaagcttactccttttcttgtctaccccaaaagccaaccataaaaaatgtgggttatactactaggaaggtataaagaaaagagaattggactgctctccataaaaactttgcataatgacaatctataaaaagatgttggatagattcatttttcatgcagaaacaacatctcaaactaccattccaattccgtcttgctagattgtctttagttaacacgacacctttaagcaaataccacataaagatcttaattttaagcggcatcttgagcttccaaattatcttgtttctctcaatatagctattattaattaaagcaagatacattgaccttaccgtgaacataccattctgattaaagttctatttaaaacaattagatgagtgattcaattggatatgaacaatagaagcacacaaatcatgccaagaaacaagattctgacccactaatgctctcctaaaagacacattaagaggaacagaactcataacactagcaattgaagaacatttcctttggataatggtatacaaggaaggatacttatctttaaaaggcaagttacctaaccatttatcttcccaaaatcttatttgttccctattattcatgaatccaaaaactcatattcaagaaagtatccttaactttcattagaccggatcaaaaatgggaatcaccttctttcctaacaacttgggttatagacttattataaagatattttctcttcaacaagtcttgccaaaccccttcttcatttattaacttaaataaccatttactcaacaagcatttgttttgaatttccaggttatgaacccccaagccgccttgatctttgggttggcaaataatatcccatctagtaagtctgtactttttcttatgatcatccccttgtcaaaagaagcgtaatttataataatctattttctgaagaacccctttgggaacctaaaaaaagaaatcataaacatagctaaacttgaaagtacataattaattaacactaatctacccctaacagacatatgcttacttttttaactactaagttttttctcaattctttcttcaataactttccagtctttgttactaagctttctaaaatgtataggaataccaagatattttacaggaaaagcacccagcttacaaccaaagatactagagtattgatcataataattctttgcttgaccaaaacaaaataattcacttttgtgaaaatttattttcaagccagatagcttttcaaacacagataaaatcagtttcagattctttgcttgctgtaaatcatgctccagaaaaatgatagtatcatccgtatattgcaaaatagataaaccatcatccactaaataaggaatcaccccatttataaaactagcatctttagctctcttaattagcaatgcaagcatatcaactactaaattaaagagaattggagataaaggatccccttgcctaagaccttttaaagtttgaaagttattaccaatttgatcattaactttaatacccacatgacccccctgtataaaagaagctatccactgacaccatttaggagtaaacctttcatcctcaaagtctgttgaacaaaaggccatttaaccttatcataagcttttttaaagttaagtctgttgaacaaaaggccatttaaccttatcataagcttttttaaagttaatcttaaaaattactccacttttattcttgcgatgcagttcgtgcatagttaacatactatatattgagcttattaacatactagaatactctcaaaaattgcaaatatgggtgatggccatcgtaaatagttaaacatatatatgacacaaaagtatctcaagtatttattgtacacgacttaagcttcttactagtcatacttactttccatcgtatacttgctgcacactctcggtgactcggttcaaacagattaagacagcttccccaacgaaaagatcttgcatggcggagaaatatccaaaaacacaacaaacaaacaaacaagtcacgtgaaaatattcaggagccacaaaatttgactgagacgacaaagaaaatctgtccacggaaatatatatactcctatgccgcaaacaacgttgacgtaatgcaatacgattttatttgattacttatgacaattattattcgtacaaaatcacatacatagcatatgtcaatccctgtaattagcaggtgaggttgctgccggggtcgacgccgaactgctggcagaactgctggtagtaggcgacgcggttgctgacggcggtggggttcttgccgtcgcactcgagcgcgccgttgatggcgcggatggtggcgccgaacccctggccggagacgaaggcgtcgtgcacgttgttggtccagtaccagagcgccgtctggaacgccagcacggggctcctcgccaccgcgtccgggtcgcccagcccgtcgaacccgatgctctgccccgccggcccgtagttgaagttccacgagatctgcagcggcccgcgcccgtagtaccccttccccgccatgcacggccactgcgtgctcgtctcgtcgcagtagttcttgctcggtccgtcgatctcctcgatgtagcagaactctgcaacaacgttatcgtcatgttaggtataccgtggtctctactggtagtattatactgtatgttttttttttggtgtttctgcttacttatggtctcgtggttggcgtgggcgaagaaggcggcgatctcgcgcttggagtcgtcgacggagccggtgcggccgaaggaagggtagccaccggcggcggtgaggaaggcgtcgcgggtgtagaagcccttggcggcgcagccgtcgtcggcctgggcgacgagcgccgcgaagaactccggcgtgacgatgctcgccacggacacgtcgttggtggccggcacgtcgcaggggcccgcctggcaccccgtgccgcagtagtcgctgccggtgccgcagaacccccacttgctgcagcactggtccgacgcgcacccgcagctctgcgccgccgccgtgctcgccgacacggccgccaccatcgccagcacgacggccagcagcgagagccttcgcgccatggctgatgattggttcggttggttactatgctgtgactttaattgtgatgtcaagcttccggtggctcgtgtggctttatagagctgacaggcgatgcatggatgaggagttgaggacaatcgataacgaccggcaaatgcatggtctgactttgggcgcgagattgttcaaacgaggaccggttcaaatgcgttgacgtccacgtacgtacgccggcatctgcacgttccggttggatggtggccgaaccgaaccgcgtccacttgtgtggactaaattgctcatgtgcgtgccgttggttcactcctactggatatatttcgtaggcaggacgaactagtggatatgggcatctagaagtagaaacgtcgtcgcaggtgtttgctgcgcgcgacgtagccatcgacgttgaactttgccgacttcatgtgtgccgtgcgtgcgtacgcgatgcgaggatcggacgcgcacatgaggtgagctccgttgcagcgcgcggcgcggcggaagagccgcgcgcgcgcgggagagggcaacccgttccgtgcagggcgaaaataggagggggatttttgtacgctcacggcattttttttgtcagcgaaaattcatgcaagttgatcacggcgacgaaattctccccttgtctcgatgagacgagagcaccatgtgcagaggaaaagaaaaattgcaaagccatcgattgctcttgctcttctggtttcatgagacgcgtgttgccattgctatgtccggttccagccctattactgtcagttcgcacagggtctccatcgggtttaaaaatgccatggtaaatccagaaaccaccttgtaaactcacaggtttcgaaagagtttaaactgaaattcaaatttccggcaaaatgcatccaaatcttaccagttttcatcgttaacgaccactcgggcgtggtattcgtttttggaaccctggtacatccatcgctccatctcattttcattgttcatctgtttgcatttaggccatctttggcaattggaataggtggcccataaaagacggcccgttattaaagcccatggtcctttgtcacgttggagaagacgcgccacggcccacgggctgtaaaaagtggggcccaaggtgaaggctcaccggtttcctaacgggtgcgacccatctaaaaatacaatgcatctcgattcttatcccttccgtcctccttcctcctcccccctccccggttcgacgcgcacatcgaaccccgacgaccaccaccgcccggccgccgccgccgccgacgcggtcgtcctctccggtaatccctgttaccctcctcgtattattcctcctcctcctcctcgccggtcaatctccgcgtcgtgtttcttctccgcgcgccacgatccttgccggcccccagccagctccgccgcgccggcggcggaggcggtccggcgtgctgccccggaatccctttacataccggaaactcctctcctcgcccacccccacactgcccagcccgattcctaactccggacggtggtcgtcgtcgccgccgccgggaaggttcctggtttgtgcctctttgtgggtaggatgcgttcgctcgttttggaattgtggggatagttttggaattgtggggatagcgagaggagaagctagtttggtattccgattcgtcttctcctcgtcacccgccttcttggaaaccccgcctcgcccgtccaaccaccaaccccgcacccccgcctcgccgcctgccgtccaccgccatgaaccaccttacggaatacgtatccatcaccgttggtgttcgaggtaacctgcaccaattcaattcgttatttggcggtgctttcttggtggaggtagatgcttgccttgcgctgtggtttaccccctcagcttaagtttggttcttgagttggacttgcttgggaaaaaaaggtgtgattttccgtgtccggtgtccctctgtgtgaaatagcaagaaagacaggtgcattgtgccgtccattccaacatgttgaatgcatgtggtctggcattctgcttgtgatttgtggcatagttttggcaccaatgagttgatgggattatgtgattagtattgtagttttgtgtcctcatgtccagtaaccagagtttttctcatgacaacatttctattgtagagttctatttactcctataacagtcttattttcaataagacgtcacttattttatgtgatttccatattggatggttgggtacacaggttagttagtatttatgacttgcttgcaaatgtcacactggacaatctccttacctcattatatggaaggggatgtgtatgattagacagaagggttcaaattcatctgtttttttagaaagtctacattgcaatatttggtatatataagtagatattcatcgcttaatgctttatagagggagttggggagcccagcattcccttttttctattataaaattcactatgtttccactcgacacgattgaactatgttagtttctgtatcttccgatagattagcacttctctgtaattcatgagaagttcttatgctgcctgaaaaatttgcaggctaggatctggtgcatctaactattcaagaaatagaaaagcatgagctacttcacttgcaagccgaacagtgggcttattgtggataggcccgtcgctggtcttgggaggacaggcagattactatctcatcctcaatattccctaacgacacattctgttcgatttcccaagcttcaaaagcaggtgtacccgcgacttgttcttgttgctgctagccagaaaaagcttcctcctctatgtgcctcgagtggaaaggtgaacccagaggcagaaaatgatgtaagtctctggcatgtcctttttgtgcatgaatgtatgatggagcatggaacatatggtctgatttgataattgcaatttttgtagtatcaatttgctcaaccccttttctttttctttttttttcatatgtgctccatcttctcccaaaacaaacttctgcctatcaaactgttgtttccttctattttatatctcttgatacctgtattggttaaactctcaatctcttgtcatcttgtaagaccttaagtgaagtcaatgtagttgtggctcatatttacgtgagcataatctttttctgaatgtgacaattacttactccctccgttccaaaaaacctcaacctaggaggggatgggacggagggagtacttcattactggatctgagcatctgttggcccatcttatttatttgagacgtcctagtttgctattcatattgaaacagtactctagcatactgaaacaaaatacataagtttatatggagagatggttatgcatttccagtttattgcactacactttttttttgctagaaacatgcatttacaatttttacatagatttaatttctgttagcattgcacttgctttgcagaattatctgcttaacaatgcatgtatattgccttgttgcagccctttatggaatctttgaagaaggccatggatgatgccaaaaagccacggcctattcaagacttgctgaaagaacagatagctaagctgagagaacaaggatctggtggaggtggaggaaaccgaaatcgtcgtggaggcagtggtgattctggtggcccagaagatgaatcattcaaggaatcattggatgaactagtccaagttatcttagcaaccgttgcattcattcttgtggtaactaacgttacattcttgtttgtactctctttccgaatgttatttcttctgacactttcacttttaccccaatttgtagcatagtcctgctttccaagtatcttattatgattagcttaactattaacgacatactgtaatgtcgaaacaacttacctgtagatagctccatggtcaatgcactaaaagacttgctacatgcattgaaactgcatagaaactggagactgagagcaccatttcactgttaagagcaatattatctgggtattccataaaagtctcggtgtagtcacagaaaaagtcggtgtaatgtagcttcaaaataaacaacaggcactaaatatatattaagaaactaatttgtatttgtgtaatattgcagtacatccatataatcagaggtgaggagctgtatcgcctcgccagggactacaccagatatcttgttactggcaagcgtactgcgcggttgaaacgtgccatgcaaaaatggcgcaatttctcagagagctttatgcaaagtgaaggctcacaagaagaccagtatgaaagagcagccacctccaaaccaacttggtggcaacagcctcaaaagtttgttcatcttatggaggaactctgccgaggaaattggcgcccgcatgcgcaggagtcttagttcaggtgctcccttgttcctttttggccttctgaagcacatggatgtggcgatgagcagtactgttttcatggctggtgcaatgacctggaatctggatagcgttccttgcccggggcagtgatttgttcttctttgttcgttaatgcgtattttctacgttttgttaagcactaaccaagtgagtaacttcctggcaattttgtagttgatgagatcgcatatataagctagccggcgtctcatgtcatatgcggcaaattgtagattatgttgaagttgaaccggtgtagcttggtttcactgcattttggtttggtttccttagcgttggaatgtaatgggtcacccttgacaacgtggctccaaatgtataatcttcaatggaaaacgagtagtaagtaccgaagcgcttcttcgctgaacacaacatatgaattcttgtcgcgtgtcggactactaggcatcaaaatgagatatccccccattctaaaataagctcacttttatatatgaatctaaacatagacatgtatatccaaaataagttcacttttatactacgtgaagaagattcctttatgcaattttcacatgataccatgcgtatttctctgttctccaattttcacatcgtcagtgaagctactattaatcatcagttactaacgaaatgaaaggagtagctttgatagtatcttttggttttgtcatacaaaccatcagttcaaacttcaaaaactatcaaaatttcgagccgttcttgtatcaagaaacaacagatctaagaagcagggtgcattaatcgcgcggaatcaaggacagtttcccaggcagtgttactttgacagcatattcgcgtgattacatttcaaatggcaaaatgccatttttctggattgagacaccatttcactgagtagaagtggatttaattgtcatcagcagaggctccggatccttcagcagccttcttctccttctgtttctctctgcgcttcttatttctcagtgcatttttgctcatctctcctctgtcccagttgcaatgttagtgatcatgcatagaggtaaaaataattacataaaacaagacaagaaaactaatttatcgatcaagaaactaaccccgtagaagcaagcccaccaaaaagctgcaattcaccaaacaaatgtgttaagccaatagacaatatcaaaaatttgagttctttaacaacttgaaatagagccaataaaacatcggggaaaaaaaggagccaaatatatttggccgagtgcgaccaacaaacaatactacttgtttctgcacaaaaccacagcagtttgcttggatagggattttgcagccttggatgtgtataaactataagtcagcaattgagccagcataaccaaggatttactcagcacaacgatgcaacaaatagtaaacaagatttatgcacacttctttttgttgcaactctaacacggcttactaattgatctctaatatataccttatcctgaacatctgcagaattctttgaatgaggtggtcgatatgctgtaggtttcgctgctatatttgcaggggccttgcttgatggttgtgctgatttagaaccctgtgctgaaactatacagaaaatgaagtatgtaaatcaattgaccagaacttactaacatggaatataagaaagtgtaaagaaccttgttttttcgtttcttcaatttttatgctacccaacgatatcgtgaggtcggcaatgtcactaaatttttcaggcgcttctggcttccagtcagcctgtgtaattcaaaaaaaaagaaaaatcaaggatggagtgtgtgtgattatggaaatattttatcaactcgttacaaattgtttaggacttaggagttagcatgcagaaccaacatagcatgcacgtctacaacaaactggtcacactgaggtgaacaggtgcccggtgatacctgatacagcttttcaaacatcttcttgaactgcagagatccattgtggtcaaatattttaatcctgtaataggaaagataaagatcacaatgatgctacccattttcattaatactccaaaggctgcaaaaaatgtacccgttgtctatttggagtctcggagctgttgtagcagtcataaaatggcgaccatcaggggaccattcactcgtaacagaacattcagcctttgtttttcctaccaatttcttttctgaataatcccagaatgcctaggcagaaaatactctgtcagttacactgtggctattttgcaaatcgcctagcaacattaaatcatttttttagcttttctagtttgtttaagattgtctcctaaaagagtatatcaagaaaacggtggtatttcccatataaaggtaaaaggctcatataaatatggtagtcgtgtagtaacataccatgtcaccaggcaaattaccaaaccctgctaaaacgataactggtcgataaaatgaggtcaaggatatcaccaggcaaatcatgactgacctgtaaaatttatatggctatacttgaacagtaacagaccaacttttataaagagtgtgttcccttcaaagcagaccacacagcaaaggctactggatcaaattattgctaaggatacatcgcccttttgggttccatcttattgtattgtaggggccttcaccgagctccagaagagggttgcattttttgttgaatattgttgctctggccggcataactgagattctgtcaaggaacactccaaggagacaaagggagcacaaagtatttgagatattaaacttgaattaccgcattgcatgtaaaaactgagactgcaaggatacatccatagaccacagcaaattctgaacctgagtaagaccactgcacatcatgcaccggaccatccttttctgccagttaacgatgggcttaatgatcagatattagagaaacagtcatcaatatctatgaatttagtacttactgagaggaacaattccttcaaaggccctatcagttgttaaatagttcaacttggtttcaccatagtaactctggttagttttatccacatcagcttgagcaacaactagaagcccagtggaccccttattccagtgaaattgaacagtagaacagcgaaaaaaactcctacgcgcaacagcttggccctgtgcatccttgtcacaagaaaagatctgaacactagctggaacaccctacttaaagagaaaaaaggaaataaaaaaacaatcagcttgtgagacttgtgtcttgtgaaagcatgatcaaagtggttgtgataaatcagacctttgcctcaggaacaaatccagcaacatgagatcccggtgcacttgctagctgcatagcagctataccaggcattcttagcttgtacacaaaaccttttgtgaaatcttttggatcaaagaattgtatctcattagtcatcatgcggcaagcaactgactcatccgcagaaaattgaaccattggcctgtgaatcaacatgacatgttccatcaaatttaaacacagcaaaccatttggcaatcgagatttggtcaaattcatgaatacaagttctctcaggctgctgtaggtcatatttttcacctaatccatttagaattataatacaagtaatactgcactcacaaattcaggatcaacaaatttaaccagtatccagtcaaagcatcgtgtgcataggataaatttcttactagaattattttcttcagaagttttgtattagaagcataaaaagagaaacaaacttgcagtagcatatgagcattgacaaggttcatttacaattataatttcaaactgctattactatagacaaaatgattgcaacaacaaatgcactagaatgtaagcaactaaagaaaatatacgctccttcttacaaagttctacaagcataatatgcggaaaaattttatgacacaaccagaaaacatgcacatactaaaagctctcaaatcagattgtaatattaagcatgggagttcaagaatcataattctaagaagcaaagttgcagtaaaacgaaccacgtggccttagacatattcttctggtagtgctggtagagcgcggtggcggtgtcgacatgccaaacggtgacattcttctcctgcggcgaggacgacttctggaaggtctgcaggaacgtccccgcgggcgacagcgcggcggcgaggaggcccgggagctcgaacgacctgacgacggagagcgtccggcagtcgtagaccgtggccgaggccgaggccaccgtggcgaggaggcgggacccgtcgctcgagaagtaggtggcgctgcacgccgtcttcgggagcctcaccggcggggcggagcccgtcgggtaaggcgggcccgaccacacgctgaatccatccggctcgcgcactgcggttgccccgggtcgagcaattcgtcaaacgggtggtagactaggtaagtactaagtagccaacctcgcggaagagatcgtggggggcgcaaaacgaagggtgggaagggggcaaagagtacctaggatatcgagggcgggcggctgagacgccatatccggtgagctgcgacgatcgatctcccggcgcgcggcgggcgggaggaagaccacgggcggcgccggcgtcggcggaggcggatgcggcggcgcggtgggggattggacggagaggttggggacgggtgggttttaccggatgcgggttgtgctccctcacggccactgacatgtggggccctactcgttttgtgagacaggcgttatgggcttggagcccttgggaagtgcgggctgaaatggcaatcacgcatcggtccaacggcccaatcatctttgtgctttctgtgtgattgggccgcgaagatcgaagcgcagcccaatcgcaagcgcccgtgcgacggctgaagtattcggactctcgttttctcacaccgttttccaaactgctaaatatgatactctcttcgtcccttcgtcccataatataacaatgtaggacattttatagtacaacaaatttgtacccattcagttttaagttgctatattatgagacggaggaagtatatatatatatatttttacaaaaatcaaataatctatttattaaatttataacagttaatacttaattatccatctcgctttgtatgggtgattagcaatgttctaaatgtctggctatactgccactatagccggagatagcggatagggaggggacagctaggagacttcagttttgacactaagatttattgggcgctaatagttgtgcttagccggagatagccgctaaactaacagaaaatagatacagcatttagcgatggcccgcgaaaatgggcttttggcatcgtggtccacgaaattcagctcaaaaccaaaccctaaatcccccacactccctagtccccctactcgtgcgaggctcctctttagtctcaactccagaattgtgctctcccggtgatggtggctcctacccccagcagtggtgactggcggtggcagcggcggctcctactctcttgcccccaagcggcggcggcggcagctgctccaacgtagtcttgccccaagtggtgatggcggcaactccaacgtagtcttgccccaagtggtgatggcggcagctccagtggtcctgcccccaagtggctgcagtggcttctacggtccagcccccaagcggcgacggtggcggctcctacggcacctcgagcagcaacatgtgcaatcaaatagtgagtcacatgtcaaattttagcccaaattctataagtttttttatttttcccctaatattttttaaaactgctaaataccttagttgtagctataacccgctatagccgctcttagctgttggagagcacaaccgttaagaggcttagccggagatttagaacattggtgattaggctagccaaaaagttttatcgaactcagcgttaatgtggtgcttcaaactttaacatctacttatttgtatggcataaaattttatacatgattttcatttaaatctttgtaatttctgagaaactccattaagaatcatcccattcaaatgagattcggttcactgtcacggtttgccacgccacatgttacgtgcgctaccctttgttatgctagcgtttggttgaacttgcctaacaaacactagccacaattcagttaattgttggctcacatattatatgctaactaggtgaaaccccgcgcgtagctgtgggagattgatatgataatggcatggttccaattttccctaataaaaaatagaaataatgtgtaagatagctagatgatagaaacttgcataagttgatgtagtttatcataatttaaacagtatatagaatgatgacccaaatttaaaagtaatatgatgtggctttataagagaagaaaatgtgagagataattccaaccatagattaatcatttgagggatagaagcaattgaggtgatatggcttaatgagagaagagagaaataacattaactaaataagaataaattgtataggtatatagatattatacaaaatgatggagagatatattgaaatattttgagaattatgtggaatgatgatttaacatgcttggattttttaaagctataaaatttaagtgaggatgaactataggcatataggatattataaaaggtgatggagagatatattaaaatattatgtgaattatgtgggatgataatttaattcacatgcttgcattttaaagctctaaaaattaataaattagcatgcttgcatgagatttgagatgtagtaaatgttagtggatgatgttgcatctttacatattgagccttaggatgtagtaggctaactttatagaaagataggattttgtagctaaattttgctacacctatgaataatttgttgccacacttttgacaaattaacttgtggtaaagttagcgttcgaacaattagatcttaaatttatccttaaaattattatacctccttgagccccattggttaccctaataagccaaaaaaatatatcaaagtttgaatttttaaatttaattttgaagtggattttaagatattttcaacgtatttttttacattgacttttaagtgataataacacatatataaaagttttacctgtaaattaatttttattccctaattagtcatgttgacttattagagaatatgagcaaccaatgagaacttaaatctcacctaacctattttttgcctaattttgcataagtgcatactacctgtaacacacttggttataactggtacttttcggatggtttaccacagtccacatacttggacaatggcaagataatactcaaaccaaatatgaatgtcgatctctaatatccttcgatcacttaatgaaacattcggggttatgatagtttgaccatagcttacagtactccagatagatagcttacgtgtgctcttgcttttgaaccgtgtctcaatatgacacgtacactagataaacgatcttggaaagtgaatgtggtactctcgctcatctctcacgtacgttttcttggacgattactcccgctagctaggctacatgcctactccacctgatggctcagctgacctgcgctaaatttgtcatccacaaatttatcagccgtgcgaaacattgacatgcaattgcaaccccgtctaggaacatagaaaagtgaacgatcgatgaaaggccccgtcccgaccgaagaagaaaagagactccgcattccacgtcaaaaatttaacaagccatccaattcacgctgcacagtacacacaacagcaaaatgccccagcactttttccatggcccccgtattatccaaacagccaaaaaaaaacccaagccacaagccatgtcgacattgtctcttcgtcccagcctaaacccatgtcgacctctgcacatgaatgcgctgcaaacgcagcgaaagcggactcgccgtgcgtccacggccacgagcgagcgagcggagccgcctgcctgacctgccggttcaggcggatcgcggcctcgagactcgcgacgcgacaggaggcgtgcatgcacctgcgcctgctcgtgatcaggcccagcgcccaagaggcaaacccggcggcggcggcgacgaggaggcggcgagacaggagagggagaggggatcgggcgagctagtggcgcacggcggctcagcggtcgcgtctcgtacgtcgtcgcgcgtcgtcgtcgtcggcaaattgaatgcggagctcgtgaccgtgtcgtctccccggcccgtttcggcctttgccattgccactagcgctactccctgttgctgcgcctgccacagcagcgagctgtgtcagcttggtgcatgcactgtactactaccaggcagtgtacgtgtggctggcgttggctctcgatcttttttttcctcttcttatttaatgatatgatctctgaatgattggtgctgtgctgggttctttttttccgaaactaatcctattggcgctagctgggtgattgatgccgtgatggccgggctgatttatacttgaaaagacgaggctttgcattgcaataatccaagccaactgtacagtgacacaagtctaaacactggtcggatttttcaccacggtcgtctgccaagttgagctgcctgcctcacatcacatgcagaaatttgcaaaatagaatgagtactgctatacatccgaccctattattcaacccctatccgaccctgtcgtatctgcaatcaatttacttcatattccctccgtcccaaaaaaaagcaaaccgtggattctcgtgccaatgtttgactgtccgtcttatatgaattttttttataattagtattttcattgttgttagatgataaaacatgattaatactttatgcgtgacttatttttttaatttttttcataattttttcaaataagacggacagtcaaacattggacacggaaactggagtttgtctttttttgggacggagggagtacgagccagctactctccatatgggctagagcaaggagcgggtaagtactggtcggatgcaagtcgtacacaccaatcgtatgtagcaatttccaaatagaataggccaaacggcggtgggcgtagctggagccgtacgctgctatctccaaactataatgacctaagattgaatggaaaattttctagtactatgaatcttgatagtctatctatccaagtatccaagttggtagtaatagaaaatgtcttatccgattttaagttcttatattttagaacgaaaggactacaaccggttcaacatattgacgttgttaattaaagggataaggagttgtaagggattattattcgatctcgatctctccctccccgaaggaactcgatcatccacagccacaaacgctgaaacttactgaaagcaacttggcggccggcagggttgatgtcttgatgatgtgattagaggggctttttggcaggaaaagagggggcttttttcgtggtcacgagcgtgctttatatcttaacaagttgctgcttagagaacagatgcgtgatagctagccaagcaatggtccactgggaatttgtactagtgtacatgtacagttgcatgcagtaatactacagcgttgagttgcatacagtaatactacagcgttggagattagaaggatcgtgtccacaacctaacaatagcaactgtggtttgaggaacagatcactaacagtatcccatgtcggcaaagaatgcagaatagctgacaaactgatatactatacgcttacacaaaaataacaagacgaaaaagaaacaacctcataattttttcagcggaggcttaaaaaagccagaaacttgatcatttatcacgacagggacaccgccaatctgaccgataatccttgcaataatgacccagcaccaacctaaatcaccccagcttggtttatcgccccaactgcaatcctcctaaacgtacttaccacagagtcacagaccagtccaccaccaactacagttgcatcatgcactcggttcaagttgaaggaattttccactactagttcctcagtaagtcatagccacccgaaatagaaatatcgatcacgtactaatctaatccctacagtatgatactccccctatattaaaaaaacaatgcaaaaacgtcgatcacaaattcacaactaatttaatcgctagagcgcattttactcctagattaaagaaaccgatgcaacatgcaaagtatgcacaccaacaccgagtacattgccaatctgatttgatctgatttgattaattttgcatgcacgcgaatgggtggccatgcttaggctgcgacccctgtgcgccctgcacgagctacagccagccataagcttccattattttttatcgtgaatcttactaatctactccattcttcttgtatcggccagtcgagtcagcagagatcgagatcaaaatcttcgcagctgcgcgatcgcggcaaaaaaagccgttgcgagttgcgacttgcgcagactagtagtagtccaccgccgcgcgctcgcgtccacaagttcttctccaccacaagtttcgcgcgctgctcgctcgcttggttggttggttgattgctcgcgccccgcgcggttgcgtgctccctcgcgccacgggtttatatgcgccactagccgagccgcgcttctggatccccttcttctgccgctcgttttccattgccgacgcgcagcacgcagctgcgcagccacacctttgcggctgtcttatcttgttcttgagttgtgttcttggttggggaggaggaggaggagatgaagatccagtgcgacgcgtgcgagagcgcggcggcggcggtggtgtgctgcgcggacgaggcggcgctgtgcgcggcgtgcgacgtggaggtgcacgcggcgaacaagctggccgggaagcaccagcggctgccgctggaggcgctctcggcgaggctcccgcgctgcgacgtgtgccaggagaaggcggcgttcatcttctgcgtggaggaccgcgcgctcttctgccgcgactgcgacgagcccatccacgtccccggcacgctctccggcaaccaccagcgctacctcgccaccggcatccgcgtcggcttcgcctccgcctcgccctgcgacggcggcagcgacgcccatgactccgaccaccacgccccgcccatgggctcctccgagcatcatcaccatcatcagcagccggccccgaccgtcgccgtcgacacgccctcgccgcagttcctgccgcagggctgggccgtcgacgagctcctccagttctccgactacgagaccggcgacaaggcaagcacctacacaaactgaaaccatcaaaccaccatgccatgctttgggttccctctttctcaattctcatggcgcaaccacgccttgtgattatactgcagctgcagaaggagtcgtcgccgccgctcgggttccaggagctggagtggttcgccgacatcgacctgttccacaaccaggcgcccaagggcggcgccgccgccggccggacgacggcggaggtccccgagctcttcgcttcgcaggcggccaacgacgtggcgtactacaggccgccgaccaggaccgccgccgccgccttcaccgcggccaccggcttccgccagagcaagaaggcccgcgtcgagctccccgacgacgaggaggattacctcatcgtccctgatcttggttgaatcttgaagaggagttcgttccagaggagaagatcctcctcctgtgttcttgggttttgccatgtccttgtgttttctgcttgtatgctagcttttgtgtttaacgttagtcctgctcaactgtgacatatttgagccactctgcttccgtcccatgccatcagtgatcaatctgatataagtttttctgaaaatgagctccaggctctgctcttatgtttaatcttccgagattaccagtacagaaagagattaccagtacagaaagaagactgaaaggcaaacaccagcctgtataccgcctcaaataagttatcagattccatgctagattaacttattttggaacagaggtaattagcaagcacaagggaaaatgggctgaacataaatacactggcaaacggccatgagattgatgtaaacaataggattaatctggaactaaaaatacagagaacaacgataaatggacagtataattttccgaactactatcctttcccgttttacatgaactccacccacactctagaaaaaactgataaggcattggaatccagaagcagcgcagacatgaaaagccctgcaaccagatatgcaaacctacggcagcagatttctgaatcggatagggctccgaattgatttcaaccatgcaaagcaccttaaagtctacaaaaatatcgcattgattccccttcaccatgagatgcaactgggttccatcttggcaggagacatcggatgatcgccatttcttttatagaacctccaaaactgcaggcaaaactaatacaacttcaagagtactgtatagaagaggctaacagtcaactgattgtatgtgatcttcagtttcatccttgagacattcgctaggtagctgaaaacttaaacagaacatagcctgcaagaaatataaaacacaatatattaggtgtcacaagaactagcaacaaacataaaaaaatatccattgcttagttactttcccagattatgcaggaaaactagaaaaactattattggtggctaaccacaaagttcttaaagaccattcaccaagagacagtttctgctaggaaaatattatgggcggtgggccatacattgtgctctcaaacaaatgaaaaagatttctgtatcctaagatcaacaaaataaagaaatttgtgcatgtaatcttgcagacaataaacatgaatcttagtcttattatatgagacagaggataccttgttaggtgcaacatcacgaaccctatggaatatgggctctgctatcttcgcattcaatttattttgtgcttcctgaaaggggaaatgggccattaaaacaaactggaaatgcctcgcaaaatatataagagcatataaaagcgatttatctcatgttgagaaacagccaaagaggtatggacttacggataatatcaattcttcagattcacttgaacggatgaaacaataacagtggatccaaggtaatggtccggtccagtatttcttttggacaagaccactgaaacaatctgcacagcagatctacaattatggactagaacaaagactcaaagagaaactgtaacagttcaatacttagtaacatgagaatcaaatgcatcaaacaaatacaagagtgcaactacatgtttggaacttacagacacatgttatggctatgaatgagccaggcccacgtggcaagttatgcagagtttataaaaattaaaacacaaacgaaaggtactttatgtagaaaagagaactcccccatcagcagacaaatcttgaattgccagtggattgaaatgaatgatgtattttgacacagaacaatgaccttgaaggcgaaagtgaatgtcatgttgacaaacaaatacaggcatgcaaaattttgcaattcaaattggtcgtttgaaaatttggagaaagaggtttcagatcagtggaagaatgtgggcctaaattggtgaaatagcattccccatcatataacaaattcaaaaccaacagagggtctgagaagaacatatagtcatggtctcatggatgaactagagattgatactgcacgtacttaggccacaaaatgtcgtataaatgccacaaaattagcattccatgcagactgtagaaatcctaggaacaaacttggcaacttgcaatacatgcatccaagtatgatacttatccacagttacttattccattgaatctggaatggtcttcacaattcacaagaaaagaaaccttcccgcttcaacagtattccgccactgcatggtttatgaatgtctgctttctaagaaaatttcacctctatttgtgtggcttttcataggatggtcatttttgttacaaatttaaaattcaaagataattatttgtgcatgacagatcccatatgcttatgccctgctgtcacttgcctagtgcctacaattgcctatcattggttaatctaaatcattttagtattgcagaaatttattgcaaacagatgaaggatctgtggttaagttttggacttcattgagcaatcaaaatgtatctgtgaagaagattcagttctagtgtttttagcaaaagaacaaaaaggacaacactgctgtcttgagtatagaaatgttatcaatggtctactactaacatggcttgtgagcatgtcatgtaacccaacaaattgcccagcacataatgtgatcattagaatgtaacagaaaagcttgatggagaggataaaagtacaaaaacattaccaagaaactgcagagcagaagcaggtaaattcattacgacatggtcaaagtgttcccatggcttgacaggtggtggtcctgagccttttactcttttgttgttcctcttctttgtatgactagcatcttcttggcagtacccatcacctataggagaggtaaaagtgtaactctactacaagtaacataataggtaaaatcttcatgcttatcacagttgttattaacttagtagattgacagacataggagttgcaagattcctaaagacataataaatgacgtaattacctccatttgagctttcttgacgcctttttgtcgcagtgcttatcatggatgagtcatttatatccttatggcagctctcttgaacatctacatgagttcaggaagtggatagcttcatcatgtgtatgaagaacgaatctgcaacaaagcaatatgtaggaggagagaaagaaaaataccactatgatttccatttgaagtcgaactttcattagcagggtcaatgtcttcactagaacaattagcagcaacttgagagtctgacttattttctgaacaaggcacttccaataaattttgcatgaacactctggcatccatgttatatgtaaatatataatcgtccaccttgttaatctgtgcatttgttcttagataacgaacactgtctggatttaaatcatttgcatatacaatacatcctttctgtgcagctggaatcgaaaatgggccaataccagcaaacatgtcacatataacatctcctttcttgaaaagggaaaccaatctgatgtgttcatgctcaagcctcgaattccagtagactaatccataatcaagtttaaatgtagcgccatattgttttacttcagttaccatatcgtttttccctgctaagatttcaaactgcggaactcgaaactcgtttgtaatggtcccaactttatttaccacagtctgaatccttggataatttttctgcatataaccatgtaaaaatattttatctgaataatgggaacaaacatagtattcttgccagttatgaataatcctgctgctttagagaacaaacagtgaatagctagatgtgtctattgtttttttacagtgcctcctgcttacacatcatgggttgcaattctattttagctatttccatgtgacagttgaatggttctctgctcacaggatgaaaacaagacaatcaagacagacatttaggaacattacaatagtaaaatcatgggcagaatctttcttttgtgcatgaagccacatgctaaatgtaaatttgtggttgctctctataatcagagttgctaaagccccttactgttttacattcagaaacaaattgtagatatgcttcatgttcatgaacatgtgctttgatcatattaagtgtacttagaaaggatgaatcaggaattgagcaagttactcgagaagatatccttacatcatagatgacctttgctatgacatctttgtatggaagcaagtcatcaggtatgttcagatgtgcaacatggcctgcatgtaccataaaaattactattagtaacaaggttccaccaaaaaatggaaagggacaacagaaaggaagcactgtcgaagttagtatacttaacaattgtttcaaaagaagagggtacctccactccagcaggcaagatctgcttcagaatatgatctacaggaaataaaagggatgaaaacccaacaaatgaaattcagcactacacatcaaaatagctttaacaatatggaatcctacattcctacacaaatgaagaagagaatattagtagcattcacaactagaaaactggaacttttgaaaagaagtccttgatttggaagaccaatttgccatctactactttgcacaagaaataacataaagaaaacatgattgaatgtgcctaagtaacacactgcaacaaaagaacagaaataagatcttagagaattagatggtaaaccgacctgcactccagtaagaataaccaagggtcaaactgtaaggtacaacatcaatgttgcaaatttgcttcagtgaatcgtaaaccttctcctcaatatcagacaggtctgtattccaaaaaccaggcgtaagcattctttcaacagaggcgaaacagattagaaacactaaaacagagaagttttctttcgatcaaaaggcgctaagcaagcatggtaaactatggtactcaagacatgagcaaccaaatggatctaactagactcaatcaagtattggtgacggcattcaaatatttacagcaactcacaatatttgcttagttctaattcacaattccagataagaacaggctaccaagaacaaacacagcctgaaaaacatacatacaggaggtccaattgacaagctctactttgcaaagtcgagcgatttggtgcaaattttagagcagagggaaaagcataccggggttctggatcttctccgacaacacgacgagccggttcttgtcgctctcgggatcctccacgactggcttcacccgcggcttgtccagtaggtacctagaaacaggggggaagacaagctcagctcagctctcagcactacccctcgctcctactaatagcatcaaacaatcctagggctatgctctccgtttcttgaatggattggatcgtggattcgtcgaccagcgagagaggagttacccggagcggagcaggcgggtgacggcggaggcgagctcgcgggggatgcggagcgcccagagctgcagccgctgctcgaacttgctctcgtcaagcttctccatggtggactctgactctcccctcccttcgctgctctcctccttgcctagggttttggcgccgccggggaggtggacgcacgtggcggccggagtcccgggctcgggagagagggcaaaccgtcgtcgagggtgtgaattgttaatgggccggctgaggaggcttccctgcgcggccttgtcaggcccaaaacattggattgcacatggagtttggaaataattaatttggattttgagaaacatacttaaatttgaaaataattttgcttaaatttgaaaataattaagtcgaattttaaaacagtgatgaaaaatgtaatgcgtgatttttttttcatgtgatactgtggccatcagagattcaggtcatatgcaaggagtcgaactcctaacctccacaccgcgagattgcgggtgttagctaaccaaatcatagttatatataagttatatcatcatagttatagtttcagtacaattacaaatgtaattgcactttaattatactatgttaaattcgaaatttttcactcaaaaaatttgcggtagtttttttagagacggtctcattaactttttccatctcgtttttttgttcatgtaatagattatcagttttctgccaggaacatcatttttccattttgggtcatacgtgaaaactatgcgcaataagcttgcaggcctgccgtggatcaaacagtacgtaattgaaaatgcacatcaggaaatcaaattaaatttcttaattatagcggctgctttatgcttttaccacctccgaaacttatcagcttatgatcacaatacattttctgcgaaattcgatcgcgtgtgtggatcgtagtacactcatacaaactgtcatgcacaagctatgttaaaacaaacaatcgaccgtacgttgggtatatagacgatacaacgacgctcgcgtggatgacgccgccgatcaccggagcgtggcgaacgcgccgccgcgcatcatctgcttgaactcgaggaagtcgacgcggccgtcgccgtccctgtcgacctggccgatcatgcggccgcagtcctccgccgtccggccctgcttgatccccagcgacgccagcacggcgcccagctcgtccacggtgatgaacccgtcgccgttccggtcgaacacgtcgaacgcctcgcgcatgctcgcctcatccacgtcgcaggcgccgccgccgccgccgccgccgccgtcgacgcgcatgacggtctcgtacagctgggtgaactcgtccatgtcgacgcacccgtcgccgttggcgtcgatgcgggcgatggtggcggcgagctcctccctgtgcacgggcatcccgagcctctccagcgactccgtcagctcctcccgggtgatccggccgtcgccgtcacggtcgaacagctcgaacacccgccggagctccgcctgctggtcgcacgccatcccctcgccgccggccggcgcccgccgccgctagctggtggtgcagccggctgcacgtacggccacaggggagcgtgtgggagggaggcgtcggaggccgcggtggtggtggtggtgggatggcggaggaaggcgtgaaggctggcctcctcttatgggcattgcaaaggtgaggaggtgggtgcatgcgtggtggctgcccgccattgggtggtgccgagcgattggtggaggacatagtggcttcgagcatttcaagattgtgttgccaaaaaaacgccattttcatgcgatattccgctgaaaatgctgtggatcgatcaaatcaactccgtggtgaagaaatgcgtccagcttgtatgttcgtctctggctataatttttttttctttttgagggatcgtctctagctattcggagctcggcatatttgtaaacaagaagtaatttgtaaataaaatttttatatacgtattattaataatctaaaagcaaagactgaaacattaacttcgatgaaaaaacttcaaaatctttctaaatttaaatgttcttcattttggcccatcagttcgagcaattccagcagccataatttaggcccacaagccagttgagcgtaatgttggcccgtgagtgcgagtgaatttatccatgacttaagccctagttcagtttgttgataaattaatcttcttaaaatttgacagtgcaaaatctgggtagactcgttaataattttttgtcaatgttagatgtttagtttgcaatctttctaaatttttgtataggtacacaagtaaacttcctgaaataccaaatgttgatagtgacaaactgacactggcagttggcaaaagtttgttaccttaataaaattcggtaaatcaaaaaatgtaggtaaacgagccggcaagccctcaaggagtgggagcgtctgaattaggcgcaaacataattgggatttggaagatatatcttcgaaaaataagcttctcgtctaccagacgagcataacatcgaaattttcaatgctccgtttttcataacgaaattttcaatgctccgtttttcatataataataatgcttatgttccggtttattcgaaattctcagtttatcagataacagatacagagtactttcatgcggatttcggttctgcactactccgtactatgttattccaaatttgatttcacgcttcacaaggacattcagatcgaatttggtgcagacctacaacaaagacagcaaattggaacaaaattaaaagcagctttccgcgttgaatgtatccagaaaacctcggccagatcacgggaaacctcaccggcgtacgagattctcggaacatccttctcgcaaacgaagaaattgccacaaaacactgacaagtcttgggacagagtgcgtttgctttgcttcgagatctataaccaagaacaaaaagacaaatctcgaatattttgaagacgaggggcatgtgccagccgaaagggcccagaaaatcaccgagggtcagatccaggtgagtttaagctggctcgatttcaatctcgcaagatggcagaccatatgccgattgcctggaccgtgtgcgtgtgctcgagatccaaacaagaagctgatcttgcaaatccgcaccccccaaaaaaaaaatccagatcgaaagaaacgaacaactcaaaaccaccccgaaaattcaacgaatcaaaccaattacacaaactacgaaaataaaacgcacacgactacaaaccacgatgataaaaagcacacgatagagatagaatgaatatgatttgaaaggagcggcggccggcgatgcttgtctctactcctgagcaagtatgagtatatatatagccagtcgcggcggctgcctggttagggtttcggtgagccatcttgggccggtgaagcccatttatatgggccggaggagcccatgtagatgggccgtgtgtcacaacggtaagtcggcggcccatccagaatccgaccgttgcacaacccgcctcgccttttacgtcgtcttcctcttcccgatccttctctctcccacgcgcaaagcaaaaaaatttcccctttcctctccacgccaagaaacgcaaaacccccacgccgaccaaggcgagaagcgccgccgccgaatcgaaccgcgatcgcgcccttctcccgccgcccccgcgcgctcttctcctcctcgtcctcgacgccgctgtgccggagtttaggcggagatcgatccggagcggggtttctcttctacctggtaggtaagcactggggctttctcttggattggtcacgcgttgtcttgaatttttttttcccgtcatcgaggaaaattttgccctatcttgctcgtttcttggttgttggtgaccgaatccaaaccctaggttatccgcaacattccggtccaattcgtgcaaactggcatgttattggggatttgtttgctcctgctaatttcatgaaatacgtatggctcgggtcccttggaagattttaggtgcgtcgtctaatctgttagtttggaacccggagcaaaatatttctgagctgtcgctgcaaatctgttggagaaacggctgtgtcccttgaagactctaggtgcgccgtctaatctgttacttcctccgtttcacaatataagtcattctagtatttcccacattcatattgatactaatgaatctagatagatatagtctagatccattggcatcaatatgaatgtgggaaatggtggaatgacttacattatgaaacggagggagtagtttagaacgcaaagcaaaatatttctgatattttgctgaaaatctgttggagaaatggggactcatgcagaatgtatgtgaaatcctggtttccttcagcaaccatatgttgttatgctacaagttgaactaatatttttctgaccatgtgcaaaatttgtagaacaaaatgtgtaatatatactgcttattgtttttctctagcaattttgtcttttccccctttgctcagtacctagaatttttcaggcaaggttgaggaagaaaagcttgctgatttgtgatggctgccccaactgcaacagctgtttttcttgatgagaacctgcatatccataggggtaaggctgcttttgatctgactaattcatcacaaggaggatttcctgtggtaaatgactgacatgtttggtccatgtgtgcagggcctgctggcaagagggctgatggattgaaggccaagccactgaagccattagcagcaaagcaagggcttcaagagaagaaggccctgagggatgtatccaacattggcaagcccccggtgtctacgcggaagcccctgcaggacgtgtccaacaccgccaagccccgagggcgcaacatttctgatggcactaccttgaagaagactgctcttcgcagccatgaggccaccaagaacccagtgaagaagactgtaatcttttctgatgagaccgcaaaatgtcatgaatgggctaaggatggggtggagggcacccacttcactgggaatgattctcagaagttggaaaaggacagtcaagacaaacgtaagagttcacttcctgcagttcaatatgccatagaacccttttgctttcagtaggctcagataatgagataacttgttttgttattgttcattctacacaggtgtcaagaagaaggtggagaaaataatgtcagcattgcacgactggccagacgcggtatttgatcatgtgctttttccatctgaggtatgtatttcaaagagcacagtgttcagacttttccagattgcttttacttttgaaatatttctgtggatttgaatttcaaggtcgaagaagaaagcttttgattttttctatgtacaaatacactacctaacttggctaactagcttggctgataatttattgaatctagaagagcctcaagtattgcttgatctctacataccttttgcgtgaacagtagctgatgcctggtggtatcatttgacacaagaagataactaatgggtacatagtaaattaatgactaggccagtattttatgttttctgtcgcaaaacaatagtggtggtatcatttgacaagcttattcttgttattttatctgtcatttgacaagcttaattgggctatttccctgtaatattctcttatattaagagaaaaaaaagtctattctgaattatactattccctgaatgaaactgttatctggatattgatggattcccttttgctaccagtagtgcttgtctttatttatttccaagctggctgacttatttcattgtggttcctctatttatatttatgcttaataatagtattcactggcatcagaagaagccagaaaggggacttctatgattcggtatgacattggtttcgctaaaagttaactcatggatgagaaaaccttacatgtattttaatagctaacaacagagaacatccatgataccgtcatgggtcagtaacagttaaaatgtttgatggttattaattgtggtatgttcttctgtctgtacatggttctgtttgatgaactgctcggtcattcattcatgctctgaagtctgaagcaacatgttattctagggataaattatgtcttgctctatgtcgataacatttcttgctttcttgtatcttttcttcttgatctccaatatgttatgtgattatctcaagcaacgcagatgcaatgctaattgtttttcaatgtatataggtggtagcagcgttttttgaagaagtaaaagagatggagctggaacctgagattcttccagagaacaataggcgtcgctcaagttcaggtctctttcttcttccttgcacacattcatgccgttctctcatctctgctttccagtgcttccatcaacaacatcgtctcgatttcttccttataatctgtatggatgtttgcccctccaggtgataaaatgaagctggctgaagatcctttcacggaagacgagcttgactactacccatttcttgagaacaatcccgttgagtttcagctgagagatgagctaccactcctggagcctggaatgaactgaagaatgctaatctgccccacttgaaaagacctcagaacagtgctattatcatcattatcctctttgcaaactctacttgctcaggagcagtttatttgtagtagtagtagtagtaactagtatcctagatgttctgctgtatgtggttggtgtgataatcattcacactttaggaagaacccaagtagcggaagcaactttagcttcctttatgttctgtgtcttggctgaaatacccatcattaagccattgtgtaaatggtagtagtagtaaactgtagtgtaaggattctgcagaagtacatgcgtgtgccacttcctctattacgaatgcgtgcacatgtgtttgatttcctgtttatattttgttcagagtttcagcttggtcaatacaatgttaggttcatctgaacgcagccatccacttgaccaccttgcatcgattcccagttcggattggatgaatttgccgttccctgttcaaaatttgacgttcgctgttcaaattggatcgtgacgaggaagccttttgccgtcgtgttcttccatcctctgcggctggttctcccgggcccacatgtcatccacccaggggaaggtgggaggaaagaccaaaaaaaaaataaaaaaaaaatgttggatcgtgacgactcaccaaggcctaggattatttatgtattgatcggtcgcaaccgcgagtccgcgacggggcgagacaccggcggccatagctcgagagctcgaggtcaacccgaaagccacgcacgcgccgcgcaatgggttccgacgccagcagcgccgccgacgcgatgggagtgctccgggcggcggtgcccctgcaggcggacgccgacctcgtcctggctaccggcggcggcggcgagcgggggcaggtggtggggctcgtcctcgtcgacgtctccaacgggttctgcaccgtcggcgccgggaacctcgtgagctacctccccccctccccacgcctctccctctccctctcttctccttcgcccgtgccttaccgcgcgcgcgacgcggattgatggtggcacgcttggttggttgggctgcgccgctgcttggcgtcgtggccaaaattgcttgtgtgctggggattgggacacgagtgaatagaccactctggattactcggaggaatatcctcctcctggcttttgccttgttttgaactccctgtttgttttgatctttattgtcctattctcttcttgcaaccaccaagcgtagtgttcctgcgtgctgcaaagctgctcatgttggatacgaggatatatacccatatggccatataagttttggtcttgctcgtcatgtgaatcgtcatcttacgtttatcaacacgctgctggaatctcccaagacatatgctcaatctgctttagtttactcgttttgtttttttttttttgttttttgggctcattcaccgtgctagtagcctagtactactccagtatttgtttgcttatgttattattagtgactggttggcttgttaaattagtgttaatgattattgtttttagaactggtgttagtgagtatttacttgttcttgttcattttcaggcccccgtcacgccaaacaaacagatagagaagatggtggatgaggccgctaggctcgccaaggtgttctgcgagaggaactggccagtctttgcgtttcttgacacccactaccctgataagcccgagccgcctttcccgccacactgtataattggttctggcgaggaaaattttgtcccaggttgttcacgcttcaatttgttgcctcaacttaaagctcctaaccggatatgtttagcttctttcgttatgggctgaagtgatcaattgatggttttgccaacgctgacatgagaatggcaacacgttatggtcctcttttggtgcctgacaaaatttaatctctaccatttgcagctctggagtggctggaaaaggatccaaatgtaacgatcaggaggaaggattgtattgatggttatcttggtgcatttgagaaagatggctcaaatgttttttcagattgggttgcgaagtttcagatcaaaaccgtgagtgatttggttctgctactcttcgagtacttcagaagaaaaatagtgtggttgtatatgaaccgtgatttggcttgatgcaggtattggttttaggaatatgcacagacttttgtgttttggattttgcaagttcagctttggctgccaggaacattggccgagtgcctccgctggaagatgttgtcatttattcagagggttgtgctacgtataacctcccagttgaagtagccaggagtatgcaaggaaccttggctcatcctcaggtattggatcactgaaaaccaattaacgaggctgtatggtttacataacgaatggaaccttttctcttacatctgtagcatgttgggcactctttgccacaggatatctattagtttttattctctggactatcaggcataggacactttccagtttgcacatccatgctatatagagttccttacaaaaccgtgtctcaccaatcatgagaacacttcatccattcctttgcagacttgaccttaatgtgattgccgggtatattcaacagggtaaagaactaaagatatcatcttgttgtcatcctcacaagggtttaataaaccacagatgcacaaaacaccaaacatggatatctaacaagtgaaattaacccggacagaattcatttatttccctttttacttatatagttactccatggacataatgatatcaactttaccttcaataaaaataaacatcaatgagtattccataaatccatactttatgattaacctgcttaaccttctaatgatgcaggatctaatgcaccacatgggactttacatggcaaaaagcaggggtgcaaaggttgttgacagaatcattatttaagattagaggtgtaaaactaacacaagactgtaatagtgacctggatcgattatctagtttggtttttattgctgggacgatgatcctagtgttctctttacttcttccttttatctcttcaatgtacaacaatctgacatatatttctttacttcttccttttatctcttcaatgtacaacaatctgatatatatttgcggttggacagaatactgatattttgctaatgtttcgtgcacggttgtgcgtaattaatctaaggaatttggtatggatgagctgggatcacttatttctgagccaaaagcagttgaattcccaaattggatgtgtcccggggcttggagttaaatctgaaactttttttgtaatgattatatacttatcgagccatataatctaaaaaaaacacaagctgttatataacacgattcatatcatgttatcatgcaatatagaacacgcattacggcttagaagcaactgtcagcacaagttggcagcaaatcaagcaacaaattctaaatacatcgcattagtttattcaagaggctcatagcaactgaacaagagaggaacagatgagatcatcatcagtacaagtttccaatgtgatctgagcatcatcagtacaaggttctattgatgaaatatgaatcctacattcctctgctttgaggaagaagccgagttgctgagcaggttgaccggctgcagttcaatgccttgacagtgtcaaaccaacggtccaaaccaatctgatcatgttggcttttaaaccggtaattatgcatgggagatacatcatagcatatatatcacatagctagcatagcatgcagtcatgcacatagttagagaagttataaaaggtggtgagcatttgtgaaatgagtattactacatcgaccaaaatcttcagtaatccagagtacaatgataaaggtgcgttaaacgaatccaagtgactctcaggcacaaatgtaacggactgtctcctatgctaatggactgatggcatcatactacgtacttagtggcatcccatcaacgtcgccttggacaaaaataggactctctggaccttcttttcctgatctaaccccaaaactccctgcagctagctaagatccttgcaagaactaaggtgcactaaattggagggccagtgattagtcattgtcattgttgatgtcaagtttttcatcaccgccctcggggttgtgttgatgttcatccctggcactggcaacttcatcggggtcctcctcaatgggcttgaacttaaccagtatggcagtcgcgttgtcatttgagtgcaagcaatgaccaacaagcttctcacaagtctcgcgtagattttcctccccctgtgttggttaacatgcatacgtcaaggcacaggccaaagggcataataacaattctagcaacaaatgaatgaacagcgaaaaacatcctacgatcttcatatgtagactttagatttcaatctcttgataacaaaacgaagcagatccatgcacatgtgttcagaactggagtaaactttcattgatttaatttaagagtgcatgcatgaaaggaacttctagagaggatgcgttttttagacaaatggatcatatcaacccggcttttggtggagtccaagataacaaggttcttacaaccaactaaataagcatataactactacacttcgtgttctcatcacagaaccagcctgctaacataatttcaaagcaaaagccatgtgtttttttaatgcattacttcatgacatgtagagaaaaataggaaggactcaccggacgtaattcctgacgcacaaactgaacaacattgttatttctcatgccatccctgaaagagaaaaaaaaatgtatttaagtttactatgtgaatatgaataaaactgtagaagaaacaaaaggaagagacatagcattgccaatgggaaacgtatatcagattgtgataatatatggtagattgctgtcatttatcaatattaacactgatacatcttagcacaattcctacaggtgtaaatgtttcatttagtgagatggttcttgaagaatgatcttgcagtataagtcagatatataaggtgaccagtggtcgttgcagtcatttccaacttattaagcctgtcagataccaaaccatcaaattaaataattgtctgaatactataaaaccccagctagtgcagggaatgacagatgtctctcttttcagtagattcagcctctccaaggacataacatttaactcaaaataagaattcaaaaatcttcaccacgtaaaaacattcataactacacatggtggtgaactagataatataccagtccaggtcacatccaattttaattaaagcaaatgtacaaacccttgtggaaaaaacaatactgtcttagaagcaagttaattgtcattggagtggatatattctgcaagagatttatttaatcaggagctagcataaaacaacaaataacctttactaattttatagcagaggacctaccagacaccatcacttgctatgacaagaaattcagtatcatcagttatgttttcctaacaaaaataaggacatctgatcagaccaagaaaacaaatatatagtcatctaaaatggcatagttacacttacgacgcgaatgtcaggaacacatgtcaccatttgctgtgaaggaggcatatttctgttctgcttatatgcaaaatcacctgcaatggtagtaacgaaaatgtcaattacaatgctacagattttatacaaacagccaaaagaaaataagataaaattataccaatcgctctggacgtggctaacattcctagaattctttgcaaaaatacatgtcctcctgctctttgaattctttcgcgttcagcttcatggtgtggtttgtgatcaaaggataaactaattgcctatggacacaacagaaaaacaaaaagataataattaggcaccaatttattgcatttggcaagagagaagatccaggcaataagacatttcacaagaaacaagtcacgcacctgaccattctttgaaagcacgcaacgagaatcaccaacattcccaacaatgatctgatttcctctaatgattaccacacatgctgtgctaccttcatatgacggcggaacgtaatcctgagggggcaacaatccagctgaagtgtaaaactaacaattcaatagttccacgaaataaaaaaatctaaaaaggtgtgcaatgccaccagagaaaaaaatgatgtccatactccataaaagaagggaacaaatgtaagaaagacatgatgagtccaacaaagtgacatatcaaacaataccatagtttgggcagtaggataacaactaaagtacaacaagaacttaacaagcttttggattctgactccataaacattaaacaagtgcttgatatgatgagtgtgtatgagaaatatatcactcggaactccacatcatatcttgagagaaaaatatggaatccatatcacacattccttcaagatacttcttgcagataagaatatgtgcactagataactagaaataagatcatgattaactttaatgcagttggatgtgtaaagaacaaccacgaagtttatatatcacctctgtgaaatggtggagattagcacaaatgttagtgagacaattgcgattagcacagggattaagtgactccctccattcatttgatcgttgcaaatcatcatcaagtctgcaattaagaaggcaggtgattacatattttcatgtttgctaatccagcaaatggtactatattttcaagaaaatgattgcaattatgaacacttgtccttccgttttccactattgagaaacatgagtgcacaaaatatgtagagtacatgaaataattatgtagaaaataacctgaagcatacagacgtaattgcattgggcagattgttgatatagtctacatcctcaagaagcatagtatgaaatcgttttgcacagtacattgctacttcagctcctgaatagaaaaaggtaaaaaactcagcatgactgtacagatagagaacgaaggattgaaggatgaatcaactgttattatgttcctaataggaaacgccgtcctttctttatagaggattgtgacttctatgatattttaaccaacgcgtgaagtggtctaacagatgaattgtttgacatttgttagaaaagatgagaatgaagatcaaacctccatggccatcataaacaccaaagaatgacgtggtcgcatctagatctagttcaactgcaagctagataatacgaaaggtacaaatcaagcttgttgtttgatcacatttacttacaggtaaacaccttatggccataaaattggttaaaagagtgcaagattactcactgcatcttccatgtgcgggcgaaatccttgcgtagtatatgaggcatacttaactctgtgattctctccttcactagatgatggtgattgttctagtggacggctgggagatgcacccatggcagaagcctctttcctgtaaggactaatgtgaacacactattgtactatctgttgaaccaaacattgttcaatactgatcagggtcactaagacttaagaagaccatgaaaaatggcttcagcatttcagaacaaaaataaaaactccaaagtttgtgccaagaacaaatgcagcagcctgcagtgcacacgatatgaaaggggacaaataatcacaggctaagatttcccactcaaatttcagtaacacctggtgccgggtaacaaactacttaacagaatcgcacttcacaccatactggggaagtgaaacatcatcaagtgttagaccatttaatgtgagctgcaaataaagatggcttgaacttgattgcttgatagtaagtaagaactaagagactcatacatctatggatgtaaacatctactgaatgaaaagtactttcatgaaaaacagagtaacactgctcgctggcactcaacagcaagaacggacaggttataaatcaagatcaccgagtttccgcgtgcacagcatcatcaagaatcaacaagaataagaggaatcaacagaacgtcaaaacccagtgtgggaaaaaaaaagagaggaaagcacacctacacgcagaaagaatctggaaaaacataccaaaataagtaaacgatagagacgagcagatatagatcatcgagcggccatgtttacatcgataacgccaggaaaagaaacatcaagaaaatgcgtaggtagaaacgggtgctacgatgaaggatgaactcatgaactgatgaacactatccagttgcaagaagacggacagatacagaattacagattaccacctcctccaacagagaccatgcgaaccgcaacagcagcgacacggaagcagcagtagacgcaacaacaggaacaaggtggagaagaatgataagtaagatcgaaaataaaaggagacaacgaagatcaccataggttggtgctcgtcacctccttctcctccaagaaaactgccaccatcttcgaaagcagcaggaacagcaacaacaagagcaagcaagaaaacgaagaaaaaagaggggaaagagatcaccatggccctcggtgctcgtcaccctccctcctcaaagaaaaccaccaccaacttcaaaaccaaccgcaacaacatcaacacataccaatgcaagaacacagaccaacttcaaaaccaaccgcaacaacatcaacacacaccaacgcaagaacacaggccgcagcattccagaccaagagtaaaactctcacagaatcgtctcaagatcgaagacaaacacaacacccaatggtctcgatcaagtactccacaggaccacggcgaacgaaacgaaacagcaagaactagaagagcagcggctactagcaacagcatcaccaacacaaacacatggacattgaagaagagaagaaatctcacggttgtcttggagcagaggaaagcagaggaggaggaggaggaggagagagtgggagagagatcaaatcaagccctcacctctccgcgattccgctgcgcttgtgacttgtgaaaattgttgtggttgcgaagcaaaagtgggtgagaggagccaaagccttgcatgcaagaggaggtggggcacaaaaagtagtaaaaccaacccaaagcttccgtcttcggcccgagcgggcgcatctcgtccgttggattggcccaacgtggctgctgcgcctgatccgacggcccaggtgcgcccctcgtgctgcccgtgcacctgggcccactcgcgcgctgccttgtggccttcgaggagggattcctcctcctcctcctccgccgccgccgtagccggggtattggtcggcgccgccgagccgctcgggagtacaggcggaggagccccgaggagctgcattgaggcccacgcgccgccgggctcgccgtcgtcggccgcttagctccacccccttcgtcttctgctccggccgccgcacaatcacagcctcacccctcccctccggggtccaggctagcgcctcctcgcgctcgcgggctcgccgcccgagctgtgcgccacgccacgagagcatcggagcacgcggcagcggcggaagaaggaatccgggtcggccatgtcggcgagggcgacggtggccgatgcgggaggtggagcggcggcggcggcggttgcaaggcagcacgcggtgtgcgacggcgcgtggagcaggagcaggagcaggagacattggcgtagacggagggagccccggccatggcggcgccggcagcgcggcgcggcaggcggcggccggacgtggacgacgtgtggggaggtggagcagcggcggtgggatgggaatggggaatttccagctctggtggactcgggctgcgcttatcgcgccagaattaggcccaccaataatcacaaaacaggccctcgttttagtccgcggaagtattgggcctaaattcagaccgtttaaactcctatgtgggcctaaatttggcccgtttataatgagtaggactgaatctagctttatctacaacagacgtataaaacagatcgacgaattagcacataattaatcaaatattagttaatttttaattaaattaatatagattttaaagcaaaatttctataaaaattctttttaaaaacattatttaacagtttaaaagcgcaagcacggagttgaaaaagggggaaaagaacacttgatttatatattattcatgtacttaaaacaagttatgagtcacgcagtatggtttattactgctggagtgctggttcaatgccaattattatgcaaccaaattgtgattaatgaactatactaattcactcttatcctacactaacaataaagtttcgttgcacatgatgcgctaattttcccagttaagatgttacaggaaatgtggagctcagagaaacctcctagagaaaaacagagaaaaaactgtacagggattaccggattagtacaacattatctcgctcctgccatgacaaatgtttgaattttatcccctcaatgaaatgcaacgactaaataatggtgtatatatgttgccacttaccaacgaaaacgaactacagtaaattgaaacaatgcatatgttacaaaggatgtgtaacatttgttgtacacattcagaagggcaaaaaaccacaagttacaaatatggggaaacaattctaaactcactcactagaggactccttctagttatttacatgtcattcgaatacgaaaatataaacaaaatagattaatatagatcattccacgaatatacgtgcaagatcaaattcaatttatacaagttgaaaaaaaaacaaaattaatggtggttatccgttaactaggctatagtttaatttgttttttttcctggtagaagttgagttttgacttatatatttgtggaataatatcttttataactatttagataacatagaagaaatattccttagagtctaagtttaaaattcatacctcaaatatggatgtacacaacatctgggccgtgttaataaagattgtaggatcttgctgagggggcaaaaagaaaaaaaaaactcaagttgcattgcatggcaaccatgatgaacgaattaacataacattgtttattacaagggatatctgctcctacagtcctaccaatctcgtcctcgatcaaccgatcgaccaccgcgttctacatggcgaggagatatgcagctgtaccccgtcagctccagcatgcagctccgttcagcgaacacctcccgatgaagatcgccgccgccgccgccgcggacggcagctggtagccaggcagccgtagttgatcagcgacaggtcggcgacgtcgcgcgccagctgagctgcacccgccgtcggccgttcttcctctcctcggctgcaccgggtgaagtctcgaatgcgtccgcggttgggcgcgctggcagatcagccggtagtcgagcgccgcgaccacgggcgttctccgtgagggactgagggacacgtcctgcgccgacgtgaacccgccgtaccttgcaatccccctcccataaatttcaaacaaaacaaactattgtgaagttagcaaaatttattcaaatttgataaatattgctcaaatttccaatgttgatcgaatttaaataaaatttgctaaattcacacacacacacacacacacacaagtcggacatagttttgtgtcaggggagggtttgaatttcgaaccgaaattccaaacgtgcgcattagacattgcgggttcgccaatgcatgcccagtaggagaaagaaacgaaagtgtatacaatatatagagatcagactaccaaaagctagtaaatttgaattgatgaatcacatactcctatatttcaaccaaataacacacacagttttgggtttacagatcaatgtaagccatcatattcatgcattgcatgctcgtgcttttacagactctcttgttctttctatacattggctatggatcctcgaagaagggatatggattttcatccctcgagaaaatatcctctcattgtttgcatgttagctaaatagttataaaaaaattgacaacatagattaatatgaattaattaaattgaaacattgcacggttacatttgttgtacatccatatgaatccagattgataaatctagaagcaatctttctgagacaatgattgtgaacaacacaatgtaacattttttgccaatgtgttcacaaattacaaaaatacatttcttgccagattcttgtaactattatccatccatcaccggctgatcactgcgtgttgagcacggtgaggacgcagctggagatatcctgagagctataccccgtcagctcgtgcagctccgagctccacggcagcgcgcccggcgggttcagcgtccacctcgcgatggagatcaccgccgctgccaccacggacggcaggtagcccaggcagccgtagctctccagcgaccggtcggcgatgtggcgcgccagccgctgcacgcgcagctcctccttccccttgctgtaccgggtgaagtgctccacgaacgtctccgcgttcgggccgcccagccgatagcccagtgccgccatcatctccctctccatcgcgagcacctcctgcgccgacgcgaactcgccgtagctggcgatctccctggcgtccagcttgaagaccgtcccctggtcctcgtacttggccgccgtgtacacggccgtggcgccgacgaggctgagctggtgctcggtgtagctcggcagggctctcgcggacaggaaccggtcgaagtaggacacggcgcggtggagcgtgccggcggcgagctcgtagcggtgggtgagcctccccatccaggcgacgagggaggcgcgtgacgccgcgctgatctgaccgttgtgcaccgtgtcgaggtagtccggcgacgggcgctcggcggcgtccttctccatggcacggaggttggcgtcgatgtcgtcgtcgtagggcgcgcacagctgcgggcgcgacgccatggagtcgtcgggggccggagcgtcgtcgtcgccgttgtactgctcgctccactccagctgctgcatgaacgccctgatagcgtcgccttcgtcgacgggagcggcgtacacgggctcgtcggccagcgctggaacgggaagcggaggaaagcccggcggcggcggaagaaaagcagagggcaccttggcatccaccttcgtgtcccagttgccgttggtgtcatcattcgatgccatggactccacctcggcggcggcggccaggtcggcgccgggcgccgctggatgcgccgggagcgcgccgatggcgcggaggtacgcgtcaagaaccccgacatccatctgcgccgcgccgccgtcgccggacaagagctcgaccatcgaggccgttatgtcgtcagcgagaaggtcggcgacgtagggctccatgatcgaatccatggtcgctctcgctcgctcgccggagcagtgggagagcagaggctagtggtggaagaagaaacttgcacacgctggtggcgactggcgaggcgatggtgatggtgtcgcgctgcgctcctcgccttttatcctggctgccaccatgggtgttcgatccgattcaggccaggcttcgcgcgcaattccgaatcgggatcgtattgatcgatttgatttgaaccaagcgaatcggtgtgaacccgtactaggctgtataaaacctggaattaggttgtgttcctttcctatttcggtctccgactctgtcccaaattcctgatgggattaacggatagctgtaatttcttaatgatgattagttgattgtttatagtcctgaattagtatgtcgacttacgaaagcgtttctttcttctttttccttttggcgtccgtgtgaatttgggtacaagaaaattgggtatcaggttaatgttttcaaatcgttctggagtcatcaaaactcaaacacgaacgcaagaaaaatccatcaaagaagcgcgtaaaaacggcaacttggtttctcacatatgtgtgtctttccttttcttcactccgactggatctctgtcctgcaatggaattaatttctagcgctgtaaattaattcaccgatcaataccattttgggtaggataataactccattccatatacaccggaacacacaaaaaaaaagtctactgttcttaaattcttaaaatacatctatttctctaaggaacacggtagagacactattaacaaaattacttaagaacgattaattgattaattagtcctgaattgtgccaaacgagatggggaagttgggaagccctgcaaacgaatgcaggctaagctttcgtctgatcagagcaatttgatgaacgtgcgtgcacccctgcagatttttactggatttgattagagcatatagagaaaattgttctgaatgtgaattcgatcattatcaaactaaatattggtgtaaatctaatataaaatagagttagagaaaatacatagtttgttttgtctatctaataacactgtggattatatgtattattgggagtaagcaatatcagaaagcctggccccgaaactttgttcaatccgtgtaaaaaatttggctccgaaagctcgactttgtacaaacatccaaaaatcgcagacggcactcattaggtgtgagaacatagatctcgacgatgtaccaaagaacataccaacgacgcggacattactaccaataaaatacctgggactacctttcaccgttgggagattgcacatgcaaggcagacctgcaaccactcttcgataaatcaacaggaacgatggccgcttggcgggaaagaaacatggggctagctagcgcaccaccttggtcaagtcagtgttttccccgcagttagtctatgtcctaataacatttaaatttaccaaagaatctataaaagtgcttgacaaacaacgaaagagcttcctatgagtgggtcaggaaaacataatgggcgggaaatgcaaagtaaactgaaaaagatcatgctcaccagttgcctatatatggcggcctggacgcgctaaatctagaaagcttcgcactagcactacatgtcaaatggctatgtcataaataggaatcctcaaacaaggcatgggttgggttggataccccatgtgatgaaaccgataaaatactcttcgtgattacgatgataaccgttggggacggagtagcatcacgtttttgggactcggcctggatgcatggtcgccactcgaaggaagtcatgccacaagtgtacgtatacgcaatctccaaaacgaagaatagaaccttgagaaatgtcatcgcagataatacctggtcacgagacctaaacctctcaatactgtagccatgacaactgagcttctggagcaactagtgatcctgtgggcaacagttcaaagcgtgcagctcacaaatcatgaagagtacctggttccacctaaaaaaaagttccttggatccactagcacaaactatgcgtgggcatcaaacaaatataagctgttcgcctagcttgtgatccataatagggactggacgttagacaaataagtgattcgaggatgtccaaaaaaacacctaatgcctactgcagacacactttggaggcaaccttccacctcctcgtggaccgtagatatacgagaaggatatggaacatgcatgctcgcaaactggatgtgcaagaacacatgaagccgaccagctagattcccgctacagtccatacctggtgtgcaggaaaggtgtttgcaggctgctactactaatgacatgagagatataaaaggagagaaacaatagagtgtgtgtttgaacacatagagctctcgacaatatccatcactacgaaaataaaggaggagaccaaaacttgggctctagcagtaacaaaatgccttgcacatatcaatccttagtttttttagaaaatattttccccttccttttccttttgtaaatctcttgttcctatacagttttttcctccagtatattcaatgaaattggcgcacctgaatgctgattcgttaaaaaaaaaggaagcttggctatgtggttcagccgttgtgtacgtgcgtcctagcgcaacagatactaccagcatatcacgtggcaggtggcacgagaagttgcgagttcgcgaatgcgtgtacatgcagtaggccagtaggaagaagagagacggtacagatcgatcaagatgtacagaaaccaagtacgaaaagttagtattttttgaattgatgaatcatatatatatttcaaccaaaactcacaagtttggacttatagatcgatgtacatacgaactctacaaattgaagccatcatgcattgcatcattgcatggttgtgcttttacagacttttttttacataagcttttacagactcatgttcttcctatagatacattggctatggattctcgaagaagtactcttggaagagagcaaagcgaggacatgcgatttgactgtacatgtcgcacacgcagcccatcaagtcgatggccttgtaccctgtcagctccgcgagatcctggctccatggctcatgccccagcacgtccagcctcgccaggaagatcgacgacgccgccacaatggacggcaggtagcggtggaacccgtacgtcagcagcgacccgtcggcgaaccgatgcgccgcctccttcaacagctcctcttcttctccgtcgccgtagtacctggtgaagtgctccacgaacgtgtacgccgtcgggccgccaaggttgaagcccagcgcggcgagcatctcggtctccatgatcgacaccatcttgtgcctcgtctcgctggtgtagccgcaccgggcggcgaccatgctggcgtcgatcttcctcagggtgtactggtcctcgtacttggccgccaggaacacggccgtggccccgacgaggcggagctgcagcgcgtcgtccgactcgggcgtcaccgacaggtagcggtccaggaagtaggcggcgcgctggagcgtgccgtcggcgagctcgtggaactggctgaactcgtccatgaaagcgatcatcgaggcgcgcaccagcgcggtcatccgcccgccctgtgtcgtctccaagaagtacggcgagggccgctccgcagggttcgtctccatggcacgtagggtggcctcgatttcgtcgtcgtagggcgcacacagctgcggccgtgtcgtcgtcgctgagttgctggtgaccaccggctgatcggcgcgctctggcagcagcggtgcgaccttgatcttcttcttgggtggctcagggtgatcgccgccttctggcagcggcaagggctcttggacgacggcgccggtgagcggtggaagatcaccgtagacggggaggaggctgccgtaggtgtgaggggtacggggcgaatccggtggcgccggtgcgagtggagctgccggtggcggtgcaagcggaggaagcgcgccgatggcgcggaggaaggtgtcggtatccaccatctgcggagtggctccgccggagaaaggatggaacaatgggagagctgtttgatctgcaagaagttcggcgaggcagggatgatccaagatcgcgtcctccatgtagggatccaagatcaaatcccccatggtctcgccggaagtgagatcgatggagagcgagaggagacaggaggcggtggcgggaagaaagttggacgctcgtggtggtggcgggaggaaggaagaaggatggtgtcgcgctctcgccttttaacctgcctgacacgatccgactctgatcaggctgcgcacgcgtgaaggaattcatcaaaatgtagagcgcgcgcggttttccgaatcaggatcgaattaacgatgttgattagaggtaaagcccgtgtgtttggactttggagtcgttaatttagcttgcgccgtacgcgcgtatataggagtaaaaccgtaattaggcttctcttagttctctcacctgtgtttctttccatttttttctttttcctttttgcaccctgactcgatctctgtcatgaatagattaattaatgtatagcttaattcaccgatcataggatattacatacactaatacacaccgttacacagaaaatagtccactagtacaaaaattctttaaatccactagagtctggaacagaggattacgcatgggagatgatatatcaagttttttttttaaaaaaaagatgatatatcatactattatgatattatccattcatgcacattgctagagaagttccggtagacactgagcatttacgaattaaccactagtatcacccgatcaaaatcttcaggttctagagcaaacacaatagagaggtgcgtgaagcgaattcagttaaatctcatgcaaaatgtaagcgtagtacgtgctcaggatttggaacttggaactacttctatggtactaatgaccactcctagctagctctcgagtggctgcaaaaggattcaaatgtaacaactaacaagagggaggattgaaacttttgaaaatgattctgcgaattgatttgaaaaatttgagatcaaaatagtcgttagtgattggttggttctagcactcttgaagtaattctttttttgaggagaacgacggcaggagatctgtcggaatttaacattagaagagaaaaaaaatacaaagtagcacataggttcagaggttacaagccaatgaatggaaagagaattacagctgcaggaaaagctaaaaaattcatgggggtttaaaggccaagcagcgcatatcaatagcttgcttgataaaataagctacttcaatatctgaacaagaagagttttggaaaattcttctatttctttccaaccaaatattccaccaagtagttagaagagttcccctgactagctgcacatccttcttagagcctacaaatttggttccagaccaccatgttgacacatccaggacaggatttattccgaccgaagacaagttttggaattgacaaattagggtccacacttgtctgacaaacacacagtcactgaacaaatgatttgtatcttcaaaggcacaaccacaaaggcaacatatccaattgcaaggccaatgcctgcggagcagattttgggcagtcaaagtttttttatggagaactagccaaccaaagaatttttttttggttcagtcggggatttccaaagagaatcaaactcattggtggcaaatgagcattcaaactggaaaaggtaagcactctttgttgtgtagacgccagactcggtccaattccaggtgatgtcgtcaggatcctgggaaagcgaaaccaattggagtaatccaccaagctgtaccaaatcatgaatttgttccacggaagagaattgtctgaaggaagtgagccatctattatctcgcatttccatctgaactgttctttgctttctctttgccaggctaaaacaactgggcacaatatcttttaaacaacggttttggatccaattatcatgccagaagctagtttttgcttcgtcaccaatcgttattatcgttgccgcttgaaagagtcttgtgtccatctcatcgcaaggcacattcatgcctacccagggtttatcaacttctttccacttgaaccagagccagcggagtcggagtgctctagagaacttgtccagatccggtaggcctaaccctctcaagcttttcggtttgcaaacagtctgccaattgactagactatcacttggatttgaatgatcagggtcttcgcccttccacagaaaagatcttctgaaacagtcgattcttttgaagacccattttggcgcatgaatgactgtaagatgatgcatcggcatagcactcagaaccgagttaactagggtttgacgacctgcagaggtaaagaagcgacctttccaagctggaagtctgccccgatcttgtctataagaggaaggaaatcaattttccttaatttcctgaagtggagcgggaggcctaggtagcggcaagggaaattcttgatctgccctggccagccggcaagaagctgttgcaagtcgattccattgcaactgatggggaaaatctcagttttgttgatgttagaatgtaaaccagaaatttgtggaaaacacgaaaggatgtgagaaagagcattcaagtcatcgggatttgggagagcaaaaactgcgacatcatccgcgtagagagaacatctgaatctgccacttctcatgccaatcggggctaacacattggcactctccgctgctttaatgatccggtgaaaaggctccatagctaaaataaacagcatcggggacaggggatctccctgacggagtcccctagcatgattaattctcatccctagggaaccatttaggagcacttgggacgaggaggtggaaaacagattagagatccaacttaaccaacgatgcccaaagctgaaatgacgaaggacctccaggagatatggccaattcacagtgtcgaacgcctttgctatgtctatcttaatgaatagactctgtttttttgatctatgaagcatctgcaccatgttttggacgtacagaaaattgtcatgaatcgcccttttatgaacaaaagcactttgattttgtgagatcatttcatttagttgaggagcaagtctatttgctagaattttggtgataatcttggcgaagctatgcatgaggctaatgggacggaagttgtcacaccccaatctgataccgccgtactacggcacctgacaggagcgtgtcgtagggaaaacggcgcgaaccgcttcctacgaaaccgcgatctcggtaccagtcccaggacatagtgctggtacccacggtgacaaatatgaatcatagcaatccttaaaataaatagaggacttatttaccttaacttaggttgcagctcagacagcccgagagtacaaccgacgacgcggacgaggaaacaccaacagcagcagcagcggaaccaacggtctaacacccaacaccacaggcgacggctgggaaccaggacgaaaccctaatcttctcttcactttatcttctcttcagggcggaggaactatatatatatttatatagagcaagggtaagtactttcgtactcagcaagtcacgggaacttaggtgtttaatgcaagcttggaagggaggcaaggttgttttgcaaatcttttatttgaagacattttgaaatcactaagtgatttatttctttctaagtttgggccgaaaagagacttgcgtctcgattcgactttaagagatgtttttcaacagctcatttagtaatgtaccgacctcccgggtcagatcattacttctcggctcccagagccattccacttgattaatcggctcccagagcctttttcattttctcggactcccagagtccagctgcccagcagcacaacaatccgcttccactcgggaagcctagtctatgatacccgcagacatcccgaatcacacagattcgtttccgaccactcaggtcgtccatctgccacataggctgattctggttacgattcccacaccacaacaacttttcacaaagcacaggcaaacaaaactacgcaacgggaaccaccttacatccgcccatgaccgtgggcacggctgttcgaacagttagttaacctctgcagaggggtacactttacccacaagatacgaacttattccgaacacccgtcggtatcggaggttcgcaacaaagcctttcccgagccgacccagggttacctcatgccacatagaaggatcaaatcctcacataaacataggccattttaggcgttcacaaatccaactccaaccaccttgatcggtaagtgagcaagcttctcgtccttgccttaccaggaacccggtttgtccgaccccgccccggcgttcccaactattggcatgcgaggtttccctgaaccgactagttacttagccagggtgtcccattccaccttgtggttgcactttgattatgttcgatgagtttcccacaggaatcggtccttatatgcgaatacgggacagtgccacataggcacaacccccgcatcgcgagttttcacaattcattttattttcaaacacaccgacaccacatgtcgggttttgaaggcttcacaaacccatttcccaagttttcgacaaacaacggtgtatgtgggatatttggtatacgcgctcagagagcacgaataccgaggtaccacaagggtggagcgacaaggaatcagggtagtacgacctacggaaattagtgcggctactgggtaggtccgtcggtttggcacgcaaaccgaggccaagcaagttaagtatgtgattctaataatgcaagttgcaaacaagataataatgacttttcaattataggggcaattgatcaaagggtgacttgccttgctcaaggtcttcacgaagcttcacgaatcttcgagaaaacccgcgatcgacgaaaatccgataaccgcaactatacgcaaacaatcgaaaacctaaacaaaagaccaaaagaaagatcctatttagactaattagtagtgccattaaatagatctcaattttacggaattactggaagttgaacggagtcaaacggaagagcggttgggaagatatgaattttggaagtttaatttggattttctggtcaaggaaatgatttatcggaattttctggaatacgagaaatagtttatgggatttgtagaaataatattcccaagaatattattaacagtcactgtcatgcgggaccaaaggaaatggtttatggaattttggaataaggaattgatttatgggacaaaggaaaaaggatttattaaatccctggaaaaagaaaaggatggagggatgtatattagacttgttcggtggcattggtgcggcccaaaggctaacgcggctcggccgaaccaaatgggccggcgcgggcgcgaggaggcggcccatgagggcgcgcggggagagagggaggcccgtcggggtgggcgcggtccaccgcgcgggacccacatggcggtggttgggttcacggtggggagggtgcacgcggaggcgggcgctagggtttcggatgcacgcggttcaggcgcggcgcgccgggtggacggatggcggcgggcccacgtgcagccgcacggcttgccgtggaccgcgcgcacaggagggaagacggagggaggaggctaactgggcgcgacttgacccagtcaagcgggcccgggactgaggtggcgtccacgtggaagccacgtcggatggggaggcagaggaggccgggcaggctgatccgacggctcacggcgtgcggcgggatccggcgaacggcggcgagccggaaggggcggctagcactggcggcaggaggaggagaaggggaactcattccacggctcggatcaggaagaggacgcgcgatgacggccggcggcggcggccaatctcgccggcatgccgatgtggccgcgcgcgaggagagcgaagggtgcgcgggctcgggcttagccgaaccggtaaagtgttgcgacgcgcacgcggtgacgcgggacccgatggtcaccggcggcgcacgcacggcggcgttatgcggcggcggaagcggcgacacggcgcggagacaaaggagaaggccgacggccttggggcagccagggggaggtcaaggggatccccgggagcgtggcggcgagaggaatcgacgcgagaggagccgacgatggcggattgcggcggcggcaatcaccggagagcaaaaggggaaaacacgacgagacgacgagggttcgattcaaagggatgggagcatctccggggttcaaggaatccgttcccggcgtcggattggacggagcggcaccgaggttggctggcaacgagagacggcctccgggaccgagcatggcggccggcgagctagcgcgcggtgcaagggcgacgagcgacggttcggcggtgagacctggggcagtgtccatgcgtgttcggggggctagccgagctaccacgcgagctagggagggagaggacgagcaagaagggagaacggagggtggcactaccaagccgagacgggcgcagtgacgagcggccgacggctcgggagcgagctctccggcctcgggccggggaaggggaagaagagggatggccggagtcctcgtctcgcgtccacgcacgcaccggcctccgacgcgtgcgacggcgaagagacgaaggcaagtggtgggagcggcggcaaggcgtcaacaatggcgcgggtgtttcgagcgaggcggagacgaaacgagaggggagggcgcgggctttataggcgaggaggagaggtcggtttggaggagggaaaccgacattggcggtcaagggagctcggctggtgttcacgggcggcagcggcggtttcatgggcagtgcgaaggcggcgacggcgtggatgctttgggcggcgaaggcggtggatcggacggccgaaaaatcgaaccgcgggagcgggaggattagcgcgggctggcacggtcaaggtgggggcggcgagctggtgctggcgtctgcgtctctgcctccgagcgctagcggccaaggagtggaggcatggcgtcgttgcttgggagggaaaaagaggaaggaggacggtggaaagggggggctttaccatgccagtttgggaaaaaggaggtgggagagggagtgctctgtctctgggatttggatggacgcgggtggagcggcttgggcacgcgctgcagagcttgcggcaggcagcggggccgagcggcagcacgacgcaggcgctaacggcggcggcgaccgggcggttgagcggcgcaggcgcggcagggctgacggcgacaacggccggtcggtcggccacgcgcgagcgcgggagagagcgaaggcggtggcgggttttgggcggcgacggcgggaagcggcgtcggcgcgagagagagaaagagagagagagagggagaaacagcgagagcgagagagacagagagagcgggcgacggctctctctctcggctcgcatgcgtgcaacgcacgtgcgagggggggagatgatgggctgggaggggagatgggccgggggaggagaatcggcccatccaaaaacacagggaggtaaggtagacttttacagagaaaactgatttggatagaattggagagatttagggtttggattcgaattcaaatttgatatttgaactcgagggtttagggatgtatcaaggggaattcaaggagaagtcatgggaaagattcaaaaggaatacttgggtatttgttctcgggaacatagggtggagtcaaggaaaggattcgaggcgggatttgaataattctggattcgtagaagtatttggcgaggattcaaaggaaggatttgaatttcagaatttgatttcagagactcaaatcggaagaggaaattgaggcggaggattttgatttcgatgagagggaacaacgggatttgaattgagatcttggcacaacttagactcgcacacaaagaacgaaaattttcgcaattaggattttgccgaattagttttttaacgactcgcgaaaagcagagcgttacagaagtgatcagcgcctgtagcatcatcttttttagggataaggcaaataaaggctgagttcagttctgcaagttgagaagtgttgagatgcataaaggataaaattgctgcgaggaggacaaaaggctggtgcagacatgcaggtttttattttataattatttagttttgtattttgcaagttcagctttggctgccagaaacactggcatatgtaggctttggttttagtaagatgttacttattcagatgattttgcatcatataacactataacagtaaatagcacttcgttctgtcaccggataaaatacaccatgtttcagtttgcaccaagttgagcacgtagtttcactttacactagggtcatttgatatatttttttcgcgaacgtgcaaaagaattatacgtcagtatattcaaaaaaatagagttttagttacacaatgcaaaaggccagacatgcccttgctggtacagggtagagacctttaggaaggagatctgaaaaatgggaacaaagctaaaaaaagctactcctataaagagggaaaaagggggtagaactcccctatgttcccaacatatccccaaaagaagctgtgttagcaagagaccagagacgaccctcctaaagaatggactctaaaaccgctgagacggcaagagggaggagctgaaaaccttggtattccacttcttccatagctgccaggaaaccaggaggacgagagagtcgaaacccttgcgaagatgctctggcagacgggccctggccgatggccaccagacctgaatagagcagccctaggagggggcgagcccaggctagccaggggaacacagtttgaggagctagacttgacgtgcaaacacactgtctaggaggatgtgattcgccatttcaaactcctaggcacaaaaaggacatgccaagtggctgtcgatggcgcgcttctacaggagatcggtcatccaccaacgctgctgaaacgcaagtcggaggaagagcttgcacttggcagagcctttagcctaccagagcagatcggcgcaaggaaagatgcgctgccccaagaagaaagcttggtaggttgagtgggcttaatagcattggtcaccagtcgaacactagacaagatgttcctcaatgccccgggagagctggataggacgcactgcatcctagatcagtaggaattgggagatgaccggcacggtaagagcgccacggatatcccctacccaggagttgctagtgagggcggaacgtactgtgcgcgttgcccggagatgcggggcaccgcaaggaggaggtccggtgagggtcatttgatagaaattgtataaaatttaatatcaaaagggtttacaagttgtaccaatattttacaagatttttctttaattatatgctgcaacctagtgtactagtgaaacttatttcaatataacctagtgtaaagtaaaagtacgtactagactcgatgaaaagtggaataagaatacaagatacattttatccgtattttgcatgttcaaatttgagtgggtttgaaattctgtttctaaaggaaattcccacacacacgaaaactattttgttcaaaatttgcataaaaaatgttgtgaaattttgcaaaataagattcaaatttgaccaaaacttgtttagaatacaacttatttcatcccgatgtttccaaaaatttgaattatgggttccctctctttttttccccaaaattgttaaccctttttactgcgttttggtttatctagctttggcttgagtaccgctagagtgttgatgtttcatgcactcctatagaagagctgagaacactaatttatgagccaaaagcagttgatataccctaaattggattagcacatatgaatgattagccatgtgattctttttttgaacaaatcagcaccgaggcgtgtcaataccgttgaatatagtaggaaaaaacaatatttacagatataaaggaaaaaagggctacacattggcgattgactttggcaatgtctccgctagtctttttttctcccaccagagcctaagttcttcctcccttcttcttttttttttttttttgcaacgagcgtcatcattgagagttgggtttgctgaaagactctttggtttctctctttctatatttcccatgttgctaggagtaagggtgaccgctccttgcttatgtgtgagcctctttttaataggtaaaacttgacaaactagtgcttttgtgaatcaactcttttaaaagattgctttcgaccgtaagccctagcctccttgactaagctaaacatgtcatctttcccctggcttttggagtaaaaaatactcacccttgctctctatacaaatatattaggttttgaaggagaagatgttgacccaatcgtcgaggagttcaccaacgaaacatgaagtcttttgtgctaaattcccaaaccatgcctatggaaaaagttagttgcttggatgcttagagtgcttagatgcttagacgctttccgccgttagcttttgcactgacgttgtttcttttcgcctccatattttatactgaagttttgtacatgtagggtctagccatgatggcaaccttcttaagaactatcatagtaatgtaatgaagttatctactctgatcaactgttgttatgtgtgtacaaacttatgtatactcggactggtactactatcatagatgcatggtagcctcccagtctaattcggcctgattgtccaagttggcgaggatagaggtgtcactatcctttttttttcaaactacaaactttttgttcgaatattttttttttgaatttttgtaaatttccattctgttgattgtctccaaaatgttttgttttaaaaaaaacattgcctgggacgaaaatataacaaggttgagtgtgcaatttgtcatgggtaaaaacgtcatttccaaaattgtctttctccaattgaacaaaaaatggttaaaaaattgtcacacaatattttagctaattaccagaaaaccaaagtgtcctacaacaaagccttctttttagagtgttctgcgataaatctataatgtccaataaaaaaatttgctattgattaatgatcagccatgaatagtgccaacttgattaagtactccctttgtttttaaatacatgctgttttctaaatataactgtgtaccttttcttttagacttacacagtacaacgctgacattcacaatacacacgcactcacccctatgaatacacgcacgcaaaccctacccctatgagcatcttcgaagactgggccggcccttttttattagaattatacagtacaacatagacattcacaacgcacgcgtaatgtaacgccccgattttcgttcgggattaaaaatcatttaataatccattttctagaaatttaataaaagttaaagcaatttaatcaagttaattattggggaaattgaaaatttcctttaaaaatcattggccgagaatattttgtaatattctgtgccctaatgaaccctttgaaatttcccgcgaatttttggagctcaagaagtaattataataatacaaagttcatttaaccaattaaattaaatagaaaacaaataaaatcctccttcctctctttgggccattttcggcccaagccttccttctctcccgcggcctgcgcgcccccttctttctcttgggccggcccagctcggctcccctctacccctaagtctgcttaacccctcccctgggttctcctccctctttccctccccgacaggtgggcccgacgaccccacatgtcaggcccttcctctaccttcggtccccggagcaaaagccgccatggacggccgttgccgcccacatcgccgccgattccgggtcctcccgctcacgccctcgcgcccaaaccgcataaaatcggttcccctccacctcctccaccaaatcccccacttttcctcaatttttggcgccaaatcgagcccccactttgcccacgatgtcgcccacgtcgctggctgttaccaccccaaatccgccactccgcggcctcctcatcgcctccccgcgctataaaaatgcatcccgcacctccctcgtccttttccccattttccctgtgcttgccgcgcactccctcgctctccccatgccgttccccattgccgccgcacgccggcgctctccagccggccaccactgctgccctacccgtcgctgcaccgagccgccaccaccatcagctccgccgctcccagccgcacaccggcctccacctcgtttccccaattcctcaccgaaactcccattccaccgccaacccgagccaccttcgccatcgccacctccagccacgccgcgccgcctctccggtccacctcgcgctgcgccgccgccaccaatagcttcgctgcgtcgtgccgcaccccgtccaccgctccccttccccaatccattgccgaaacgccgccgccacattcaccatctctccccgccttccgccgcatctcatcgccgcgtcctcggtgagcacccctctcccttccgccgtttcccgcgccaccgctcgctgtcgatggccggtggccatgcgccgccgcctctcagctgtctggctatgagccgccgccgcccttttggccgtgcactgccaccgtggactcggtccatggtggagtaactcatttgacccgctgacgagtgggcctcgtgctttgtggacgtggtccgcgcccctcctttttgatgatgtcagcagcaaccatttcctttgaaaaaatatatttaataattgcgcaataaatcggtaataattatagaaattcatttaatggctcaaaaacttctaaaattcatatctaattcatacaaactccaaattgagccattcaaactgcaaaattcatctaaaattgagatctatatgtttgtttactttttatgtattgtttccttggtgtttattagagtttttcttcgttttgcgtgacagcgcgtagattccgttgtttcgaaagtccgcggtcgcaaggataagagttcagaagatccaagtgaagaagcaaggcaagtcacacattccccttgagcatattgatcctaatttattaatgttttaccgtttgcaaataaatatgcatgttttgctaattacatgggatcagggtttacctatcggctcgcttgtgccatgtttacttgatatctgtcctttgtcaacattgggtcataaatcgactagctcatgttacttatgtgacctagctagaactatatgcttagccatgcttaattgccactagctcagttgatgggataattgcagtattagaccttgttagtatcagaacgagctgcgtgcttgagacacccgaccatgttgcattggtcgtaattatccaactaaaatgcgactgaatggtgggctgtgggtgcatggttttactagtcgcaccatggcaattaaggaccggttcacgggaaaccctggaagacttacagtgcttaccacaagcgggagtgggtaactgcttgatctgaagtatagctcgaccctttcctaggcaccggtggcgagggtgggcgtgatggagttgggtcggctggggtgtccggttgtccagctaccggattcaccgcggcgcacgaggggactgcccgctgccttgcgaggagtgggagtgaaaccttagcgtggtgtggatggttaggggagagttatatgaagggtcttgtcacaatcactcgacgtggtgacgtgttcatcatgggcacatgatgacacggtgacatgccggtggattgtgtcttgtgggtacagttgtgcacctctggccagagtaaaattattcgaatagccgtgcccgcggttatgggcgatcgaccagattcaccgtgattagtctcacacttaataaatcgacccaatgcactgtagttcaggtgggttggttgggcctgttcaacatggtgtagcgttgataagtggagatttaatattatcttaattactcaactgtttactgtttgctcaataaaatgttttacaaccgcctttacgcaaatagccccaaaaacccctctttgtctccccttgcacgaatgcatcgttggtgtggcttgctgagtacggtggttgtactcagccttgctattatttcccccttttcagaagtgtagtgcttctgagctgaagatgaagttagaggacaaaggcttaaagttagaggaccaaggctcataccccagttgagttttgcctgtaaagtggagctgaagccccgctaggatcgcctttttccgcggctcaaagttagaggaccaaggctcatatcccagttgagttttgcctgtggagtggagctgaagccccgctaggatcgcctttttccactgctatcgttctctttcggtgtgaggactaagtgcctcttctgtaagtattttacgctttatttacgtttggatctgtttattacttgtcgttttgtgtaacctggttacttgtcgttttgtgtaacttggcaaatccttgaagacattcacagcgcacgcgcaatcaccccctatgaacacatgcacgcaaaccttgcccctattgggccgtcaaatccttgagattgacgaagtcacaataggcgcatcgttgtcgatgagtacgttgcctatcactgaaagcacaacgccgttaaattctagaaaattcgctcccatagggagtcgaacccaggacctcaggtactactgaggctcttgtaaccattaggctgcaggccctttcgctataattgtgtacttttgaacataacatttcatcattcattttattaaaaaaatagtgtaaatatgctaaactacaattaccattaataataaaataagtcacaacaaaataaaataaatagagtgacgctccggtgctcactacttaaagtattttactacaagtagaattaatctcgaccctttattttaaagggtatattagtaatcttttaatacagattaggggtaattttggcatgggatatttctctgtctcatcgctcgcatcaagtacgattgctactccttaaaaaaagggttatcgctactcccatcagcggcggcgcggtcggcggcgctgccagcgttgattgaaggggaaaatcgtttcgctctgtttgcacacatcggatgtccctcgatgtgaaggaagcggacgtgctgaccgcggccggcgtgccctaccagcgcctcgctgcgtgcgcgacctgtacatgtccgtcatctccaagctccaggagaaggaccactcctccgtggtgcacgtgcgttgatttgtgtggctctctgccatggaatttgggcctttttctttcacatcacagaccaacacatgtcttttctgtacactttgtcctcactcgtgtgcacccgagaagaatttcccagtcggtcacccatcccaaattgctccaggccaagcagacctcttcctggtcggtcacccctcccaaattgctccaggccaagcagaccaacacatatcttttctgcatactttgtccttactcgtgtgcacccgggaagaatttcccggtcggtcactgtagcgcccgttccgtcgtggcgcctagcgggaaaattatctcttaaaaaccctaaatgcgaaatttgtttctttgcttattgtctagtgtccgtgccatctcagatctcaaatccccgatctatcgtcgagttcaattccgaatccaaatccttccaaatcaatttccttcgcaaaagtctattttgcctcccccggggtcgatgggccgaatttctctcggcccatctccccctcccctcccctcccccggcgcgctcccgctctccctctccgctctgcccgcgcgcgtgcgcttgagccgcccgcgccgagccgagccctcctctccgctccctcgctgtcgctccccgcgcgtcgttcgcgcgcgcgcgcccacgtggtcgtcgcccgcgcccgcgtggtcgtcgcccgcgtcgcgtctgcgccgcccggccccgctgccctgccgcgcctgcagccgctcggccccgcagccagcgcgcgtgcccgagccgcgccactccatccgccgcgcctcccgttgcaagccgcgcgcgcgtgccgagtggccgaccgcctggtcgtcgccgtcgtcagcgcctgcccgcgcctgtcgcccgtgtcgccgctccgctccacaccgccccgccgtcatcgccgtcgtcatcgcctcggccccgccactccgcgcgcaagccgccaagggacggaggcagagccctcctccctttgccgcgacgcccccgctcccctcctccttttcccaaagaagaaaggggcgagccccctttctctccctccttttccccttttcctcccgccggcgtcatcctccctccgccctgtcgccgattggatgcgagcgccgagcgccagctcgcgccttgaccgcccaagtcggttccaaaccgacattgccgcccttaaagcctaggcgccctccctctcttctcctcccatcgccattgttgccgccgctttccgagctctgtctcgcctccgccgttcatcgccaagcgccgggagagccggtgcgttcgtgaacgcggaaggggactccgggcgctcgtcttcctcctcttccccggcccgaggccggagagattactcccgcgccgtcggcctctcgtcacagcgcccctcctcatctcggtagtgcctccctccgttcttcctcctcgctccatctctcccccttagttttcggtgctagcacgagtagcctccccgtagctagccggcgctgccccgaccgttgccgtcgctcgccgtgtgctcgccgccgtcgccgcccgagctccgtagcacccgctcgtcgccggcctcgctcggcgtagctccgcccaatccgacgctagcagcgaattcccgtagccgcgtagatgctctcaccgccgggaattggtccctcgtgacctcgtcgccgtttccccctttgctctccgccggttgccgccgccgaaatccgccgccgacggactccctccggcgaatccaagccgttggctcgctccctctcattctccctcgtcatcccggtgtacgccccgtcgcccctcatcgtcgcaaggcgccccggagaaaccgccgccgcccgccgtccatttgcggccggcgccttcgtcttcctcccgccagcccacgtggcagccacgtaggcgccacgtcggcgccagctcggccgagatcgggtcgggccgaccccggtcagcccctctcgtgcgcgcgttccaccgcgagccgtgaggctgcgcgtgggcccgccgcatccgttcctccgcgaaccgcgcgcgtgcaccgcgtcccagccccgcccgcgcgcgtgcgccgcgtgctcgctccgcacggtgaaccgagtcaccgacaagtgggtcccacccgggaccgcgcacggtgagcccggtccaccggctctctctcctccctcccgcgcgcgcgccttgggccggccggcccatttagctcggccggaccgccctaattttctcgggccgcgccctagccaccgaggagaagtctatattccctccctcttttcttttcttttccaaaaaggatttaattaaatccttttcctttagaccaaaaatccaataatcttagaaattcaatatcttcccaaccgtaaatccgtttgactccgttcaacttccaaaattcctcaaatctcgatatctatctaatggcacgcatagaggtcattaataaggctttatttttcgccgtttgttgagttgtctcgtttcgcgtgtagtttcggagcccgaagacccgcagtgcgaggatttcgaggatcaagctccagatctcgagcaaggcaagccacctttgaacatcttgagcctatatttgaatttaattatgttgcttgaaaaatattatgcattgataggatcgcacttaatctgttgtcccgtctgcaaggcagattggcagacctacctaattcgttgcatttgacccttcctttgttaattgttatatcatgtccccttgtaaccatctagttgcgtctcgatattcgtgcaccctgtgcgagtatcgacggacaccttcaaacttaaaatctgaaaaacaacttgggtaaaacttgggttttacaaaagacttggaaaacccgacacctgggtcggtgcttgcgaactaaatgaatttccaaaaccgcggaccggggaatgtaccgggtgtacggtttcccgctctcgcacttaaggaccgattccttggaatttcatccaaacataagacaagtacgaccacatgggtggaatgggacacccctggctgagtaactagcttatcaggggagccttgatgccgagagacatgtggattcgccggggtggtgtcggggaggacccctgggcttcctggcacagtatggtctgggacctaacctgttgttggtctgggacccctctcgtcggcatatggtaaacctgtgtcggctttggaaatgccttgtcatgaaaacttggaggtctcccgacgtggctgatcccccacgggctgggtgatccgggttagtaatgtcgtgtgggtaaagtgtaccccctctgcagaggttaacaaactgttcgaacagccgtgcccacggtcatgggcggatgtgaggtgattcctagcgtagttttgtttgactactgcttgtgaaattactgttgtggaaaggggttcgatgtttgaaaaatctgcaggtgatgggatcagctaggcccgggtggccgtttgaaaattgttggcccgggtggctgtttgaaaagctattggccgggtgccaaccttgtttcaattctaaagactgatacattgcacatactccgaccggacgagacgcactgtctcatccgtgtcgtttgagaagcactcacttagttgtttttagaaaagagttcaaataaaatcaattgaaaaaacaacagcctttccttgaagcctgcattaaacacttatttcccatggcttgttgagtactcccgtactcacccttgctctatctaaataatccccccagttgctgaagaagatgaagcggaacctgcagatgaggagttcttccaggagcaagccggctacgatgagttttagggtttcggcctagttcccaagtcgcgcctgtgttgattggtccaagtcctagcttccgtttcccttttgtaatgcagttgtgagctcgggatctgtccgcagcccaacatgactgtacctctactctataataaagagacctttgttgctgtgatattctgtctccctgtgataccagcactgtttcctgggactggtatcgattaacaggttaatttggagcgtcacgggctagttccggtcgggattagttcgaggcgtgacagtcacccatcccaaattgctccaggccaagcacgcttaacccggaaataatttccgggtcgatcacccatcccaaattgctccaggccaagcacgcttaacccaggagttctttggagattggcttccggaaaagaagttgcaacttgttgatatgagtattctattaattctattaagccctaggccgggatgttacacattctgtctactgaaatctgtaccgggcaaccaaccagtaatggttgattttttttttctggtgctttgttgtacagccacaaacccatgttgttttggacagatgtgctagccaagcttctgaaactttttaggattggtatttgtaaatgggtgatacatggaaattgtatgagtaggtttggctcgaaaagcacttgctttcctgatagcattataatttaggacaccaaagttgtgtttaggacatgagagagtaggattcatcaagaaaggaaaataaattcaggttaggttagttatccccaacagaacatatttgcagccatgtacaaacatggcatgatgctccagtttccctttgatgatctgttctgtcaatcatttcagttcttcaacgaccaaaccttgttcattgcaggggaactcgagttcaggtgttggcacctaacttggcaaatctctagcacttgtcttactaccaactgcatctgcaggaaacaatatacaaatgtgcaggcctaataggccgcgtgtggtcgtcgccgctggaattgatcccaactccagcggcgccggcgggcttggattccaggtgatgctgcgccgccgccctcctcgacttctcctccttcttcgcctgcagcaccctggtgacctcgtcgacggtgatgaggcggtacgcctggccaagaagcagcgtgtcccgtggcttgagcagcttcacccgcgtcacccgcaccgtgcccgtgccgtgccgctcggcccgcgccggcggtggcagcggcggccgcatctcctcggcgacgcggagggtgacgagcgcgatgtagttgcccgggttggcgcagggagagggtgagttagatactgataaactacgataatacccctacatgaattattatcctggacgaatatactcttccaaatttctactactactaactctggtgggagtagaactaaatctcaaccctccaactaaatatgattaacggctcagattgctttctactccaggtagaaagcaccggagcgggactcaaataaataatatttatatattctttattgagccaaatgatcaaactttatatctaaaagttaacaacatcttatattttaaatggaagaaatactaatccgagcaatatttttaagacgaatggcagcaggagttctgccgaatatattagagagagaaaagcagtaccgaagattacagttgggggatcagggtgacaactgagtgagactagagaaactcaacggagtactacagaataaaagggaaaacaaccggagagaccaaagacattagtcccggcgcgaggactctagtaagtcaatattttccttcactaggaaagcactaatccgagcaatttgatctaagcggttattcgccgttctgtacgtgcatcctaacgcaacagatactagctagacatcgggacatcgctagttcgcgaatgcaaacccagtaaaaaaaaaaaaagggaacgacagagatagattatgttgtacagagatcacagaacactagaacagagtaccaaaaaatagtaataaattttgaattgagatgaatcatatgtatttcaaccaaaaattcacaattttggttttacagatcgatgtacagacaacagtgcaaaattgaagccatcatgctttgcatgcatgtgcttttacagactcttgttcttgttgagttgtgatccaaattcatttgcacttaataaaggccagcttctgccgtacggatcatcatcccttttagggttccactatatatatacctcttgtaagccgccgtgcggcgatgtaacctcacctcagatatagtgaagatattttgctggctggcgcccgtggttttttttctcctgttttaggagggttttctacgttaaatctcgtgtcttttgtgattgatctattgttttttatcgtttgttcgcctatcgtttcctaacagttcttcctatggatacattggctatggattctcgaagaagtactcttggaagagagcaaagcgaggacatgcgatttgactgtacatgtcgcacacgcagcccatcaagtcgatggccttgtaccctgtcagctccgcgagatcctggctccatggctcatgccccagcacgtccagcctcgccaggaagatcgacgacgccgccacaatggacggcaggtagcggtggaacccgtacgtcagcagcgacccgtcggcgaaccgatgcgccgcctccttcaacagctcctcttcttctccgtcgccgtagtacctggtgaagtgctccacgaacgtgtacgccgtcgggccgccaaggttgaagcccagcgcggcgagcatctcggtctccatgatcgacaccatcttgtgcctcgtctcgctggtgtagccgcgccgggcggcgaccatgctggcgtcgatcttcctcagggtgtactggtcctcgtacttggccgccaggaacacggccgtggccccgacgaggcggagctgcagcgcgtcgtccgactcgggcgtcaccgacaggtagcggtccaggaagtaggcggcgcgctggagcgtgccgtcggcgagctcgtggaaccggctgaactcgtccatgaaggcgatcatcgaggcgcgcaccagtgcggtcatccgcccaccctgtgtcgtctccaagaagtacggggagggccgctcggcggggttcgtctccatggcacgtagggtggcctcgatttcgtcgtcgtagggcgcgcacagctgcggccgtgtcgtcgtcgctgagttgctggtgaccaccggctgatcggcgcgctctggcagcagcggtgcgaccttgatcttcttcttgggaggcacagggtgatcgccgccttctggcagcggcaagggctcctggacgacggcgccggtgagcagtggatgatcaccgtagacggggaggaggctgccgtaggtgtgaggggtacggggggagtccggtggcgccggtgcgagcggagcttccggtggcggtgcaagcggaggcagcgcgccgatggcgcggagccgcggaggaaggtgtcggtatcaatcggcggagtgccgccgccggagaaagagtcgaacattgggagcgctgtttaatcagcaagaagttcggcgaggcagggatgatccaagatcgcgtcctccatgtagggatccaagatcaaatcccccatggtcgccggaagtgagggagagcaagaggaggcaagaggcggtggcgggatgaaagatagtaggacgctcgtggtggtggcgcgaggaaggatggtgtcgccgtgtcgcgtcctcgcctcttatcctcgtgggtgtgtccgattctgatcaggctgcgcacgtgtgaaggaatccatcccaaatgtccgaatcaggatcgaattaatgatgttgattagaagtaaagcgcgtgtttgaaagcttgcgccgtacgcgcgtaaaaccgtaactgggcttctcccatctgtgtttctttcctttctttgcatctccgactcgatctgtgtcatggtgaaattattgtctagcttaattcagcggtcataggatattacatacagtcatacactgatctgataaacaccgtcacgcaaatatttagttcactagcagtctagcactaaaattcttcaaattcatgcacattgctagagaagttacaaaaggcagtgagcatttacgaattaaacactgttaacgttcgatcaaaatcttcagggttccagagcagaacaatagtaataaaagtgcgtgaagcgaattcaggtaaatctcaggcaaaacgtaagcgtagtacgtgctgacgagttggaactactcctatggtaatgaactactcctagttgtatccccatcaactttgtttggacaaagagggagatagcactgtaacatcaaaactctctgcagctagctaagatcctagcacgaactattcctgaggaaaatgggccaatgggagctcctctgattcgccaccgatgtcttgctggccgccgccgccatccccgggattgtgttgaggttcatggggctcctcctcaacgtcggagaggacaggctcctcatcgatgtcggacaggatagggataaccgcggcgccgggcttgaaccgaaccagtatgaccgtcacgttgtccctcgaggtcaagcaatgatcaagaagcttctcacaaatggcgcgcagattttcctccccctgtgttggttgcaagcaacaaatggatgaacggttacaggcatgtagactttagatttcaattgcctaaataccaaccagccagccaagcagacccacatatgtgtttagaaatggagtaaaaaattactacttgattcaagagcgcatgtatgaactatgaaggtaggttcttgaaatttattcattcgaaaggatactcttctatgcattactgtcatgacaatcagagaaaaatgaggaaggtggactcaccgagtgtaattccttgcgtatgaaatcaaccacgtcctgacttgacatgtgacccctgaaagggaaaaaaatgagtttaactttactatgagaatatgaatgaaattgtcaaagatgggggctgcatatcagacagaaaatatatggcagattgcaatcctttatcaatattagcagtgacaagttatatactgtaatttagcataattcctaccagtgtaaatgtttcagggagtgccatggttctcgaagcatgtccttacagtagaagtcagatatacaaggggcacgctggccatttccagcttagtaagcatatcagataccaagccaacaagttaaataatcatctgaattctatgaaaaaatacctagtgcagacccacagggattggcaaaaataattcaaatcattcaccatgagaaaacatagagaactacacatctaatttaaattaaaccaagtcttagaagaagcaagcaagttaactttagctgaaccgatgtgcatacatgggtatatgaacctcctgtgtcaacactaaataagcctacatacatatgctatactgctatgcatatatctaaaaatctggagtgggcatactctgcatgatattttttttttaaatcgggagcaagcataacgaaaagaaatcacatctattatttgtatagttgatggcccaccagatgccgtcagttgctatgacaagaaattcagtatcagcagttatgtccacctaacagaaaaggaaagctatcagatcagaaccagcaaaatttttagtcctctaaaagaacttagatatacttacaatggtaaactcaggatcacatgtcaccatctgctgtgaagcaggaatattttggttcttctttaattcaaaataacctgaaatgtaagtaagaagaacgccaattacaattgatgaaatatatgatatacaaacaagtaaacaaccagaaagaaataagattaatagtataccaatcgctctggacacatgtaatagtccttgaacacgagacacaccccatcctcgcatgagtcttccatctgagcccatgacaggaattctttttaccaatactcgtcctcctgctcttagaattctctcacgttcacttccgacggttggtttgtgatcaatggacaaatcaattgcctttggatgcaacataaatagaaaaaaataggcatcaaattaatgcattagctatccaagcaatgagacatttgacaagaaaaaagtcactatacctggccattatgtgaaactacgcaacgagaatcaccaacatttccaacagtgatctgatttcctctaatgattaccacacatgctgtgcttccttcgtataacggcgccctgtaagcctgctgagggagcataaatcccaactgaagtgtaaaacaaacaattcaatagttccatgaaagaaaaagggtatataaatatgtgaaatggcactggagaaaaacagcgtacaaaaaataaagaaataaatgtaaaaaagacattatgagtcttttaaagtggcatctatactctatactcctataaaatagagtagtgatggtggtgagtggtgaatctatcaccactgtcatcactaactccctactatttggaaaagtaaaaggacaagtgggaccagatggtccacatgtcagcaccaactccctactttttcataaaaaggaaaaaggacagtgtgggggtggggagggggggctagaggatccacatgttttggcataatgggttaataatatttttctttaattaaaatcccgttgtgtgtattgcaacacacgggcaatatgctagtatcagaaaacactacaattttgggtagtacgatgacaatcaaagtgcaagaacttaatgagcttatggctccaattctgtaaaacaagaacgtgacataataactgcatcaggtgtgaaatgtaatgatgtaccacttggaactccagatcatatcttgggaaagaaaaatatggacttcatatcatacatactcctgattttcttcaagataataatatgcactctatacgaatacgactagaaataaaactttggttaacttctgtgcagttggatgtgtaaagaacaatcataagttgatatatcacctcttcggaatgccagaggttagcacaaacgccagtcttaaggaactggaaacattcaccattaccacggggataaagtgactccttccattcatttgatcgttgcaaatcatcatcaagtctgcgattaagaaggaacactgattacataattcgtttttccaagacatattgcaactatgattctatgaataaaatgggtgcaacaatgtccccttttttccaccatagaaaaataggagtggacttatgtagcaccatatgcagagtacatgaaacaattatcgacaaaataacctggagcacacagatgtaattgcattgggcagattgttgagatagttttcatcctcgcaaagcatagcatgaaatcgttttgcacagtacattgctacttcagctcctgaagagaaaagattaaaaaaaaaactcagtatggatattttctaaaatagagagtggatgatgagtcaactgcaatcctgtgttactagaatctttgataggaaacagagcctatatatggcagttgacatattgccattatgaacaaaaatggacactctctttccttttaggggattatgaattgtacaatattttaactaacgcacgaaggtctgttatgctaacagatgaatagttggacatttgttggaaaaagatgagagtgaagatcaaacctccatcgccatcataaacaccaaagaatgatgtgttccttaatgcatctagatctagttcaactgcaagctagatcaataagaaaggaataaatcaagctcagtgtttggccacaattaccggcaagttaacactttatctgtaggattatgatcccaacaaaattgataaaggcagtgcaagattactcacagcatcttgcattgtcggacagtatccttgcatagttgatgaggcatacttaactctctgattctctccatcgttagtaagcttcgacgttactgaactgctggcagatgcacccatcgcaagacttgctttcctgaaaaagactaaagtgaacacaacgttgtacaaatctgtttaaccaaatattgttcaatactgatccaagtcactacgtcttaaaaagaagagagcgtccaaaatgacaagctcttccacatttcagaacccaaaagaacatccaaaaagcgtctcgaaactaaacacagtagccagcagggcacatgatcattacaaaggggagaactattcacaggctaagatttccctctgaaatttcaataacacctgctgctggtattaagctactttacagaaataacgcttgataccataatggggaaattaaaaaatcaataataaggcaccatcgaaccttgaaacaactagatcggttggtcggcaaaaaacaaaaactacttagggggacctacaacttacaagttacatctataaatggaaatatctgttgatatcaaaagaatcagaagtactttcatgaagaaataaaaaacaccgataattactcatttactcttgcaccgtttgttagcactcaacagcaataagcgctgatcagataacgatcaccgagttttccgcacgcacaacgtctgcaagaacaagaggaatcaacaaaacgtcaaaacccacatttgtgaaagaaggtgaaaacacccaaatcaccacatgcagaaagaatctggaacaacaacataccataagaggtaagcagaataaagtgagagatgagaagatgaagaacacgtagagttgccatgcacacatcaataaaggcccaggaatatcaacggaagatgaactcaagaagaacaacaccattccgtaccgagagggagacaaaacggagatcaccatggggttgcgggtgctcgttagcccctcctccaatccaacagattaccatgataccatgagatcccacgccaatagcgaaagcaactgctgaagagcaccaagaaaacaatgtagaaatggacgagtaacatcgaaatgaagagggcaacgtcgatcaccataggttccggtgctcgtcacccctcctctaccacttcaagaaaactgcaaccaatttcaaaagcagcagcagcagcagcaaaagcaagaaaaacagatggaaaaaagagcaggcgaaaacgaagagaagacggggacagagatcaccatggctctcggtgctcgtcaccctccctcctcgaagaagaccacaccaacaacttcaaaagcagcaaaataacaacacaatccgatgcaagaacacgagataacattggagagcaaagtagaacccccaaaaaatcgtcacactgcttgaatctcgatcaggagtagcaacggaacaacaagaacgagaagagcagctaccaacagcgccaccaacacagttacacaatcacatggccatgggagaaggtggaggaatcttacgcgttgtcttggagcagaggaaagcagatgaggaggaggacgacgagagaatgtgagagagatcaagtcctcacctctccgcaattccgctgctctttgcagcgagttgttgcgattcgcgaagcaaaagcgcaaatgcaaaggcagcaccaacttcgcacaggaaggctgcgtggacgcatcacctccgttggatcggatatacgtggcagcagcgcctgatccgacggtgctgctcgtgctcccccttcgcaacgccttggccgtcagatggtgtccacgtgtgcggtccgatgcagaggccggtgaggattcctccgctcccgccgccgccgccgagcggtttctcttcgccgtagccgccgcattggtcctcgcgccgccgtcccggtcgagaggaccacgtggacttccgctgatgctgatgctgctcctccccggtcggaggagctacgaggcgctacgctgaggtccacggcgcgcgggataacttctttcattgattgaagggcttgtgatggcttactacaagagttaaaaaggtgggcaacaagaaggcggtcaccagctgcaactaataggatggctacttgacgagggcaaaagcgcaatagcactgaaacccaaggcaaagacctattacaagcagccgcccctggcattaccgggaggatgcctagccggggttcgaaaggactctgaaccgccgtcgccgccccccaccccgcgctcgccgtcgtcgtcgtcggctagctccactccttcgtcctctgctacggctgcccccctgaccacagcctccctcctcgccgggcttgccgcccgagcaccgcgccactgccatgccggatagggagcgcgcggcagggcggcgtatagatgcggagctagagggcgcgcgcggagagcaggaggatgagccaccggcgcaggagaaggaagccgagccgcggccatggcggcggcggttggaatgggcgaagaaaatgggctctcacgtgggctgtacaaatctacccaatgtgaatgggccagaattttccggcccataaaagcaaaagcttttatatggagtttaatgaaatataagaagaggggtaaagcatatgtcattagcagtttaatgaaatagtcatgtactaaaaaaatgaaaaagcacgagcacagtattgatgtttaagtatgctttaatcagtttaaacaagttgtcagtcacgcactatgatttattactgttgggaagttggttcaatgacaaactgtctatccaacaaaattgtgattaagggactacgggttattagtgcttctatgggctattagagttgaagcattatcttgatggcaattgcttaggaagaagttaaccactaacagcacatatatcacgtagctagagctagctagctatttttttttagaaaaaaaaaacaagattgatcatattgatccggcttttacaagaaagccaaagacattcacagcagttcagaatcaaacaacgaaaaaaataaaaaatacttcctccgtttcacaatgtaaaactttctagcattgcccacattcatttagatgttaatgaatctagatatatgtatgtgtcttagattcattaacatatactccctccgtttcgaaatgtttgacaccgttgactttttagcacatgtttgaccgttcgtcttattcaaatttttttgtgaaatatgtaaaattatatgcctacataaaaatatatttaacaatgaatcaaatgataggaaaagaattaataattacttaaattttttgaataagacaaacggtcaaacatgtgctaaaaagtcaacggtgtcaaacatttcgaaacggagggagtatatatatatggccaatgctagaaagccttacattgtgaaacggatggagtaacagattctatcaggacgcatagacactaaaactactggggtttccaatatctgaagaaacatcagggcccgaggacattccactttcacctcctaaccacaaagcatcaaaacacttccagaaacacttagacagagaacctgaaaaagattacagtcatcacagctaatcttcaagacatgcatgcagatggctagagaagtcatgaaaggcagtgatcatgcatttacgaatcaagtatcgttaattcgatcaaaatcttcaggaatgaatacagagcagaacaataacagacgtgcgtgaagcgaatccaagtgtgctcccaggcaataataataataataataaataacgtgatcaggaggcaacacgaggactactaactaaggtctaggaactaatcctgttctattctcgatcaaaactctgtgcaactagctaaagattctttgcacgaactagctaaggctggccaaacagcagcgccagtgcttctccgtcaagcgcgtcatcgaggtcgagttgctgctcgccaccgccctctgggttgtgctgatgttgctcagccacggcggcgccgccggcgacttcgtcggagccctcctggatgtcgggcagaacagggatcggctggccggtgccgccggcgacttcgtcggagacctgctggatgttgggcaggacagggatcggctggtcggcgccgccggcgacttcgtcggagccctcctggatgttgggcagggcagggatcggctggtcggcgcctggcttgaactggaccagtatggccgtcgcgttgttcctcgattccaggcaattctcgacgagcttctcgcaagtggtgtgtagagtttcctccccctgtgcgattacaatttacaggcatatgtcagatgcaacgggaataacagttctaccaacagatgaatgaacttcgttactcctgtagctgttgatcatatatagctcggtaattggtaattgaatgttagattgccttcagctccatcaaatcaaaaggagaaaggaaagtaaaataattgcagctttaacataaacttcatagacgatatggaatgaaaggatcaataaaagaattttccaaggagaaagcaaaaatgtgggcgaacatagctacttagtcgtccaagacttaaaccaaaccttttcgccggaagacttaaaaccaaacttgaatagcactgtttcttaccagtgttgttgtatttggagctatgttcttgtttgtggctaattggctatcctctgtaaagcattctcttttctttccctgatttatcaaactttgacagagctcttgccttcgctaaaagaacaaaagaaaaaaaaagaaaaagaatgcactgcaaacatcctatgatcttcatatgtagactttagatttcaattgcctgtcatccaagcagatcgcatgcacatatgtgtttaaaatcagagtaaacatttcttgatttaagaacacatatatgtaggtaactactagaacttgattcattagaaaaaaaatgcatagctgtcataacatgtagagaaaatgaggactcaccgagtttaatttctcatgtacgaaatcaaccacatcctgacttgacatgtgatccctgaaagggaaaaatgtgtttaagtctactatgagaatttgaatggaactgtaaaaaaataacaggagagaaaataaatttgccaatgagaaatgtgcatcagatcgtgaaaatatgtggcagattgcaatcctttatcaatagtactagcactgatacaagatatatcctgcaacttagcagaattcctaccagcgtaaatgttccatgaagtgagatggttcttgaagaatgctctggcagtataaataaggggaccggtagccatttccaacatactaagcctatcagacactgagccatcaagtaaaataactatctgaatattatgaaacacagctagtgtagggatcggcaggtcttcctcttttcagtagattcaacctctccagggatagcatttaactcagaaaaagaacgcaatattcttggccacgaaaaaacatacgtaactacacatggtggtgaaatagattagataccagtccaggctacatccaatttaaattaaaccaaaatgtacaaactcttgtgaaaaaaataatactgtcctagaagaaagaagcaagctagtaagtcaactgtcactgactggatatactctgcatgaagacctaccagatgccgtcacttgctatgacaagaaattcagtatcaccagttattttcgcctaacaaaaaatcccatcagatcagacccagcaaaacaaatttatagtcctctaaaagaacttggtttacacttacaacacgaatgtcaggaaaatgtgtcaccatttgatattgaggacgataaactatgttcttatatgcaaaatcacctgaaatggtagtgaggaaaatgccagctacaatacaatagattttagtaagaactaccaaaaggaaataagattaaattataccaagtgctctggacgtggatagctttccttcaatacaatatggaccccactgttccctgatttcccctcctgagtcttttgcaggaaatttttccctccatacttgtcctcctactcttagaattctctgacgttcaagtggaacgtttggtttgtgatcagtggataaatcaattgccttttaatgcaatgaaaaatacagaaaacagaataattaggcacagatttaatgcattagccattaggtatgacagaatgaagaaatgaggcatttgacaaggaaaaagttactacacctgaccattctttgaaagcacgcaacgggaatcgccaacatttccaacagtgatctgatttcctctaatgattaccacacatgctgtgcttccttcatatgacggcagcttgtaagaaactgcctggggggacaaaaataccaactgaagtgtaatacaaagaattcaacagatccttgaaataaaaagactataaaaagctgtgaaatgactctagcaaaaaaaatgacattcataaaagaaggaatgcacaaaagacatgatgagcccagtatagtgacatataaaaaaaaacataattcgggtagtagtataagtggataacaaccacagtgcagcaataacttaacaagcttttggattctgactctgtaaaacaggcacttgacataatgactgggtatcttgaaacagataaatacagacttcatacgcacactatatgactagaaataaatctttgattaacttctgtgcagtaggatgtgtaaagaacaatcataagttgatatatcacctctgaggaacgccacacgttagcacaactgccagtactgaggaactggaaacagtcactagactcgctactcgactcactactacgatggggataaagtgacgccctccatacatttggtgcttccaattcatcatcaagtctgcagttaagaaggaacactgattacataattcattgtttgcttgtccaacaaacgaaactagatttttcaagacattgcaactatgaagacaatgggtacaacgatgtcccactcttttttccacaaaggaaaagggagtgaacttatgtagcgcaatatgcagagtacatggaacaaatatctataaaaaaaacctggagcacacagatgtaattgcataggacagattgttgagaaagctttcttcctcgcgaagcataacatgaaatcgttttgcacagtacattgctacttcagctcctgaatagaaaaggtaaaaaaactcagtttggtcatcttataagatagagagtgaagcataaataaaataaaatcctgtggtcctaaaatctttaataggaaacagaccttatagatatcagtcgacatattgctattgtgtacacaaatgcacactatctttacattttagagtattgtgaattctatgatattttaaccaatgcatgaaggtatgttatgctaacagatgaattgtttgacatttgttagaaaagatgagaatgaagatcaaacctccatggccatcgtacacaccaaagaacgatgtgctctttaacgcatctagatctagttcaactgcaagctagataataagaaaggtacaaatcaagctagtgtttgaccacaatcacttgcaatgacacctttttttttctgtagggctatgagcgcagtaaaattgataaaaggagtgtttgattactcacagcatcttgcatgctcatacgcaatccttgcatagctgatgaggcatacttaactctgtcattctctccttcattagtaaccttcgatgttaatggacgtttggtactggtcgatgcacccatggcagaacttgctttcctagcaaagaccaaagagtactgtgaacaacagtgtacatatgtttaaccaaacattgttcaatactgatccaggtcgatcactacgtcttgaaaagaatggattatcaaaatggcaagcttctcaacatttgagaacccaaaacacatctaaaagtttgtgtcaagaacaaatgcagcagtctgcagtgcacatgatcattagaaggggagaaatattaaattcacaggctaagatccccctctcaaatttcaataatatctgctacggggtttcacaccatacacaggggaagtgaaacatcaataaatgttacacccaacagcaagaaaacggacgtacaggtagcgccattgagtaagagatcaatgggtttcccccgtgcgcagcagcatcgtcaagaattttccgcatgcacagcatcacaaaaattaacgagaacaagagcaatcaaaagagcgtcaaaacccacagttgtagaaaaaagggaagaacacccacatgcagaaagaatctggaacagcaacataccaaaagaagtaagcagagatacacgagacgagcagagatatcacatcatcgagctgccatgtgtacatcaataacgccaggaaaagcagcacgaaaaaggcattgatagaaccgggatgatgaactcacgaactgatgaacactatccagttgcaagaaggggcgcaaatacagatcaccatgggggtcgtagtgctcgttaggatctcctcgaacagagcacagaccaactgaaacagaaacaaacaactaaagcaatctccaagcaaaggagacaacatagatcaccataggtcttggtgctcgtcacctccaagcaatctgccaccaacgtcgaaatcagcaggaacagcaacaacaagcgcaagcaagacagaagaaaagagggggacagagatcaccatggctctcggtgctcgtcaccctcctcgaagaaaaccaccaacaaacatcaaaagcaacagcaacaacatcaacacaaacacccgctgttcgatcactcatttacccactactcgatcaaataacttcacagaatcacaacaaaaacgaacgatacagaacgagaagaagaacagcgcggctagcaacagcaccaccaccaacacaaacacaccggccatggaagaagtgaaggaatctcacgcgtttcttggagcagaggaaagcagaggaggaggagagtgtgggagagagatcaaaatcaagtcctcacctctccgcaattccgctgctcttgcggaagcaaaaagcgtgggtgcgcagagccctgcatgcattgcaagatgctgttttcttctacctggccacatctcatccgttagatcggctctacgtggcttgcttgctcctgatccgacggtcgaggagcacccgtcgcgcagctcgtgcccctgggccccgctcgcgctgccttggccgtccgatgggtgccacgtgtgcggaccgatgcggagcacgcggcggcgtaggccggccggcgacggggaggggaagaggggattcctccgctccgccgccgccgccgacgccgcggcggcggctctcgcttcccgcgcggcttctcttcgccgtaggcgctgcatttggtccgcgccgccgtcgtcatcggatagctccgtaccttcgtcttccgctccggctgccgctcggctctagcttagcccgctctccaccccctgctcctcgatcggtcctcgcggcctttggcgcccgagccgtgcaaggcagcacgcggttggggagcatagagatgcggggctagagggcgcgtggagcaggaggacgagccaccggcgcagaagaaggaagggaccccggccatggcggcgacggcggtgcaacagcagcagcacgctcggcgtgggaggtggagcggcggcggttggtatgggccgtaatttccatctccatgcatatccatatccctacgggctctcaaggaaaagaagaagatgggtctcccatgggctggaaaatttcggccatagatccctttgggctttggctatcccaggggaaaagtctgatttatcctcctttaattattgtggcagtacaaattgcccccttaattgaaaaatcaaacagtcttcaccttttactttttaataccaaaggaattactccctaatagactccagagcggttttggccctacgtggtacacacgtgacaatcaagtcagcataaaaaatatagataagggtaggacccacgtggtgaccaagagaagaggcagaattgataagtaggccctatcttttttttatgctgactggactgctatgtgtccgctacgtaggaaaaaacactccggagttgggcaaggggtaattcgtctaatataaaaagttcaggatgatgaatgttttgaattgaggggggtaattcgtactaccacaatacttcaaggggtaatcggactttttcctttcgtaggtcgccgatatttttcttccatagaacgtccaatataagtcccttaaaatataagcaaaaccgagaataacaacttcctcaactataaatatataagtttaatttgcctctccatgtggtttggacatcggctttgtcctacgcaacgcatgttgacctaatctttatcctacatggcatctacataatattatagtaataaaaagaaacaatgggatgcacctgcctcatctcatcttcttcattatctctccactctttttcatctctcccctctttctcctctcacacttccggtagaagtagagactagagaggccgggaaggaggtagtgacggcgcggagctgatgctggggagggcattggcggctcctcccctcttctctcccaatatcggggcgccagagccatcagaggcagggggcgcagatagcagaaggctgttgccctgacaagaagcgaaaggtgcttggggttgatggacacatgcctctttcctgtcgctagctgaggtaacccatcgggaatttcttgattctctgactcagtgctagccttcgtcttctccaatggcggcaatggcaaggtagggacaatgctggccggatcatattctccctatgctagccatctccctgttccctccgcgtcctcctagaccaccaccatagcgtgggggagaggggagaaaaggctgcgatgaaccaacggtgggaagggggaggtcgctgatggaccatgtcactcaacaacttcactatccgaccccctttgaggccaccttctttctcaccttagccgtcccacgtcaacttcggcgctcccaccgcccactccatctactaccacgacgacctcgtctaggagtcagacatagcgtatagggctaacttcttagtggaggccgcgcttggcaccatcctcgtcgccactgacaagcctatgtttgtcgcctccaccattgcggcgcactactagtagcaagcatggcgaattgaatctgatatgttattatacccggttttacagttgagagatataaatcaaatctgacctatatacgagggaatcaatttgtaccttttccttttcttccaaacaatctctggttgtaacaacagcatggagagttcagtgaagtatatatattgagcaaaagcaacacacatctaacattgtaaaataattgatgggattaatgacaagtgctaattcagatcatctccagttgaatattgcttccaaagattccaagtgtgcgagatgaatattaatgttcaataatgaaacgcgtgccgggaagagcagtactccccgtagtatgtttcgcagcaggcatgcatatgaacattattgacgtattctattgaaccagctgacctttcttcgcgaaatcctatcattatatacctgccacttgacccccaaaatgtatgccacattgtaactatcccgtcgtttttctcgtggcaacgtgtcgagtgtgtggctgagcttaattaaagccgttgtcgtgcatactgttatgttactgaggaactaaacaccaaagacgcatactgccatatagtggtactatatattttcactgtcaactgacagggttgatgcttaagcaactcatgcttaattttcctctctaaatttgcagtagttttctctcatattaccatgaggagctcaggagcctagcatgtcgctgacagtttcacagcttggagtagagctggggcgtgcaccacttgaagaacttgccggtggggaggtcgccgggcgggagcagcgcgaggccggcggcgacgcggccggcctcctcggcggtgcgggtgccccagccgcgggtcatgtcggtgcgcgtgaacccggggcagaagcagttgacggcgacgcggtcgccgcctcgggcgaggcgggcggcgaggacgcgcgagtaggcgttgagcgcgagcttggacaccgcgtagtccgtccacaccgccggccacccgcgccccggcgccgaccacgtcccgtccttcacctcggccaggaaccgcgacgccatccgctcgatcttcccctccgtcagcgacgcctcgtccagcagcatgctccgcagcgacgggtccctcaccttctgcaccatgcccccaaaaaaaaaaacgctgattattaattcaacaatgttttactctcgcgtataacaacatggagtaaaatactattccctcgatttcataatgtaagatatcgtttggattcattagcatatatatgaatatatgcaatactagaaagtcaaacggaggaagtaatgatttctgaaacttgcaaatgtcactataactcactactgtaagatgcacgtggttttgctgtcttgttaattctcattactgccatgatgtaacaatctatctttgagctattatgattacctaattcatagtactgagtaacatgtgactggtgtttgttgagaattcagatgactttggagctcagacagttacgtggatagagagtactccctccgtcccaaaaaaaaaagacaaactatgggtttccgtgtccaattttaactgtccgtcttatatgaattttttttataattcatattttcattgttgttagatgataaaacatgattaatattttatacgtggcttgtctttttaatttttttcataattttttcaaataagacggacggtcaatcgttaggcacggaaaccaaggtttgtctttttttgggacggagggagtaggtacttcatttttcatccatcctatacctaccaatacaaacaccaaaaaactaaaacacctcttctttctttaatctcaatacaaatattcctcactttatctactcttaatgtcccaatacaattattcctcactttatctatttacagtataatgattacttaaaaatatatttattttaggataaatgggataagtcaaaaatgaacttatatataaggtggagggagtaatagacagggcacgactgatatcatgtgcaacgacagagactcttgaataaccttatcatctgaaatagtctagtgcgttcaaactttgaagtccatgggccatggcatctcaatcagctgacgagctcagaggatggtttgattaggcccactcaggaaataaacaaagttttaagtcaacaccagcaaggcagcaatgtgaactcactactcggcagccggcaggtgtgaagtttcaagagtgcctcacaaagtgataattgtagtactgcaggcgtcagagaagctgtaggggcaagatttgcttgcgaactcactattcagccttttcagacaattaacgtagcctgaatattacgtgcagtcaagagtgttaggtccccatttttttcctcggaaacacagtgtgcggccattgccggtgagaatcaaaaggtcaattagcaagggaggccactatcatctatacaaaatttctctcctatgggatgaaatatgtgtaacttactgactccataaaggtcactaaatggcactagtaattcgcttgaaattagaatgccatgaaccattaaattgatgatcacttacatttaggaggccaagctgggagctgatgttcaggatcctgctgttggcagccgatcgccggaaaagcggcaggagcgcctcgatgagcatcttggccccgtagaagttggtcctgagcaccgtctcagcgtgctccaccgaattggtgtcgatctcgttgaacgaaacggcagcgttgttcacctgcaaatgtaaagcagacggcaaagagttcaacattagatccggcaaacctacagagatagcaaaaccacaaagaaaaatgtgcacatctgaagtagttacgacaccggccaatttcagtagtggcaattggcaaacacttgctttcagtggagcttttggctagagttctagagttagaaaccgcactagaatagtgctttccgtaaggcataagctaacgatgtagtttatggcagagaagatgtaaatggaattcgaccagatcagccctcgaagaaagtcagagagtagttctctttcagtaaaaaagaaattcagaaagtagttgggcagagtggatcacgcagacgaaattgatctaagtggttaccgtgattatgatacacgtacagaccgtgtctctgccgtagtactttaacatcaagcactacgtacctgctctgttcatgactgcaacaacctacatagagcaattttacggtcctttagaaggtatcatgaggtactattttttctattataaatttgatacctcttaatatctaggtactattatgaggtaccaaattttacactaaattttagtaactcatggtatctccttaatgaccgtagaattgctcacctacatatggttgtttgttagcaatgacgtgcaagcttttcttgcgtatttcaagaaataaaaatttagccaagttgttacggacagattgtgttcttgttttgcatgatcgagttaattaggtgcgcttgtcgagctttgtctggtcgatcttggataagaaatagagctgaatatatattttcaaacacgcgaatcttcctttatattttcttgacgtcaacgtaaacatataactaagacctacaacagctaggcatctacaataatttagtgtgaattagtgtaatgacttggattctaatctctctttttttaaaaaaacttggataccatttaatcaatgtagcaactgccacagcttagcttgcaatctagcttattatatcgtttagacttcagagaacagctccatctgcagtactgttccatcgtcatggaatggaagacatgggcttcctaatagtttttatcagctttacgtagaatacttgcattggcccgcatggaaaagatgtataaccaatctagatagatcagcactggatcttttctcttgttaattcgagtgtgctagttttaaaattggatcgtgtatcatgcggatccaagcctggtcgatgcttaaatattattagcttaaatcaaatcctagccagacatggaagcatgtacgtatttgtatatatatgcgtaatgacagcatgaggactagttctttatacttctttatattgtttatgtttgacctggtcgtcctggtgtgctactgaactaatcaagaggcttaaacacagctaattcatgtactttgcatttagataattatgtgttaatctatttcttaagaagaggaggccaaaaactactatatatcacgctactcgaggaaaaaaaagataaatatctacatcatttgttggtcagtattgtaatagtgtatattgaccaatatagttttttttataagaactaaaattgtatttataaaatagacgaaatagttctatagcagatcatgcaataattttgctttcaaataattttaatctgactctacggaaaactgtactggaatttcagctacggctagcttagcttgctactagtacttaattaagtgccttgaaaggccattaaatcttaatagaaaaaaatgttgccttggctcattatacttcagcttctggtgaaaaaattgctgcattattagctcgtcatacaaaagggcaaactattcttcacctaagaaaaatctgcgctgtgcacatatgcaagtaagggaaattgaccgcaatttttagaatactcccacaaaagtcaacagtggccagtattatgcaatcgaaaatccaaataacaagtgaatgatgacgccacctgactgcctaagttggtcggtctccgaacgagagaagaaaactggaccttaatcaggacagcgacggcatatatgcaaatgcaaaatggtgatgcaattatcaaaacaatcaagagcgtgatatactacgtaatatcaagtcaacatcaatgaccatgacttggaccagcttcgtgctctcgtcacgatctattttataaaaattttttatatcctgcgacatataaaaggggaacacatcccatccgaagagctaacggcgacattgactacacaacaacagtgtcagatggatcacactctagcaaccaggaagctggccaattttgctttaccgttctatgaattcacattcactattgctgcagtgtgagttaactcgataggtgtggagtgtggtggcaagcaaaactagccaggctttcgttgcctgtcacatactttggcaagtaaagcacgttacttttgatcctaattaaagtgtaacgcgcgcacacacaaaaagtgtgtagcttaggcagccacactctggaaagaacgggtaaaagtcagggtgggatgtaaattttgattttgaatttttaccaggtgaaatggctaggagaatgatacgtatagccgatcaattatacagataggttggttggtacatgcatgattgactggttggtgccaataatacactgccacagcctacaattttcaggttattttgaaatctatcgatcattctatctatgcatcgatccgcaaatttgaaagatgaaacatcgtagctagaggaaaccgacaacgaaaagcgggtagcggatggatctgaaggatggatggactcaccaggatgtcgaggccgccgagttcgtcgcggagccaggaggcgaaggcggcgacggaggccggatcggagacgtcgaggcggcggaaccggacggagcggaggcccctcgcgcggagcgccgccgcggccgcctccccgcgcgccccgtcccgcgccgtcagcaccacggccagcccttgctccgccagccgcgccgccagcgcgtgcccgatcccgcggttcgcccccgtcaccaccgccaccgtctcccccgtccaccacgccctgcgcgcatgccccccgcgagcgaaaacatttctcgatctcatcagcgcgcgcgccgcaataatcaaattcaaatcgtacaacatggggatcgatttgctagggcttactcgggaggaggcgtcgcctccttggagctcgacaagtccatcaatggcggagaggtgcttggcgcttgggagtgggagtgggggtgagagcgagggggacgggaagcggaggccggagggcacgggtatatataaggggacggcaaggccaccccggcggcttggactttagacgcgggggcagcggagaagcgaggggaggttgctttgaaattcgtgcgggggcaaacgtggggtaggggggaatggggggattagttgcggtccatcgaggccgcgaggcgggtcaacctgcaggcagcaacgacggagtgcactgtggtgactaagttagccgtatgaacggacatctcgccagtggcatgcaggcccgtgcgattaatttaacgtcagaactccttgttacacgcacaacacgtacgtacgcgcgctaaaggcatctttatatccatttggaatgataaatggtaaatagacagcaagtggaggagcggacggccccctatcgtccacgcgcgggcgaccgggggcgaaaccctaacactcggccgccgccaccctctcctcctctcccccgcctcgccgccgccggagcgcgccgccggaaactgcgcggcccgccgggatggcagcggcggggccacaaccccggcgacagcctgtctccggcacgaggaggtgacacggcgcgctgggaaggccgagcggcggtgcggcgcgtgacggcgacgtctggcgcgtgtggcggcggcaggtggcgcgggagatgcgggtgacgacgcggctggccgacggtgaggctggcggctgacgaatgccaccggcatgcttggtggtggcggcgtcgggcgaggagccggggcggctctgcggcgccggcgcccagtgctgatggtggaggtggttggctgcgcccgtcggtgaggtagctccggggtgctcggtcgtcggctcgtcgcctcgtcggagggtcagtgaatcggggcagtgcggcattcttcgacggtcgtatgcgatttggttcagtgtgtaggagaggatagggaaccgtaggcgaaagccttgccatgtcttatggccggcttgacgatggcgacgccttcggcgccgttcccctcctttgaggcatcgttacgacgtgttccctcttcttcttttaccactgtgctccgggtgaaaaccttgccctgttccgggcaagcggcaatggtgattcacatcgtgtctctgttaggagtgacgtttggagaacctttcatgcacatgcccgatcgtggaattggcgttagctccgtggcttctaccttcacactgacgctcaataggtcgggaatgttcggcgaggcctttgccttattggatctgcttcttgctttgtagcaggcggccaacggccttgtttgtttctgctaggtggagtcggagctgctttgttgatggggtgtgatgaagcttggcaacgataacacgttgcaatctctctctaggtgtgttggtgccaacaacaagcaggaagcggtgatacggtggatttggttgatgttcgccatgggaagtcgaagctgtttggtcgtttctgtgatgagcttggcaacgacgacacaagtttgccgtgaagtcggagctggtttgctttggcaagcttggcaacgataacatgctttcaagtgaaggtcggagctgctacgtcgcttttgcgcaagcttggcaatgatgactcgtgtttgggctccgtcgatggtctattttgagtgggttgtagcgttgagttgttgtgcgtgctgtgaacttgttcggccgacaacaatagcatcctttgttttctttttcttgtaactcgtctaggtttttactcctgcttattgaaaatataattggcagcctctgcctgccggtttagtttcaaaaataaatggtaaatggtaaaagttttagtggtaaaaaatttagcatggagttggtgtatagatgcatcctaaagttttaccaatttagcattaaaaagagagagcgcgtggtcccggagcatttttttggcaaaatttgctaccctatactagtaaatgataaatgccaaattaccaacttttgctactagtgtttaggtccgaaatggcaagcgccggataaagtcattgtttcgtgactttccttaggctgcgttctttagtcagggttcccaacccatatccctcgttatctgcgcgcacccttttcaaactgctaaacggtatgttttttgaaaaaaaatataagaaagttacttaaaaaatcatattgatccatttttttaaaaaaaatagctaatatacttaattaatcatatgttaatggaccgctccattttctgtacgcacggcattagttttcaactaggggaaacgaacacaaccttagtctctaatgaatgggggaggaaaagataatgcgttgggttccgttaaaatgctactcgcttggtagccataccactcttaagaggggttttagacattttgatgcattactagtctgtcccataaaaaacctaattcagttatgattatttttttttacgaaggggtactcggtattaaccacatctaaatacgatgacgcctcttgctcctttgcacatcagatcaatccacacctcctcctgttcgtctcctcttccctctggatgtcatgcttacagctataacgtacgtgaggggaccctccactcctccagccgccgccaccccgatggagagaagctgaactatcaccatattgtccttttgtcgaaaccgaaaagagtagcatatcgtccttttttattgaacgggtacacatgggcgtacttagggcactttcaatgcataataccccttgttataaagtgggttcacacattagataagattgttgctacaatatatatagtaggaggagggattaacctgagtctcactggtctcactcaatcaacaaccatgtgagagaggagaggggagaggagagaaattattgttatgtttttccctaaatgaagatcttatattatataggtagctcagtatatataaggactgttatatgggctactcctacaatggtgaggtaggccatatgaaactataatgaccacttctcctatacattatgcctatggatgtccttaggagaacaatgggatcttgatcccatttttcaataaacggtgtgttttttttaaaaaaaataaatgttgctttaaaaaattgtattaatcattttctagatcaaaatatttaatattcaattaatcatacgctaataactcatctcgttgtataatttcttaggccccctttgattcaaaggaaaatcataggaattatagaggattttattcctataaaaatttttcctatatagcgctttgaatcaaaggaatgaatcctatgaaattcatatggaatatcttttctcatgtaagttttggaggaaatttaacatgaggtagaacctcatggaaagaatcctttgagtctttatctctcctcaaattcttttgtttttcctatggatcaatcaaacagtcgttcctgtgttttgcaatcatctgttttacacttgtatttctgtcagaatcctatatttttcttattcctcaattttttcattcctatgattcaaaggggcccttagttttgtcatttaatttcccctcctctcactactatctatggagtatataggattaatttcgatgaggtcggatgatatgactgcctttttctttttcgagaactatatgattgccattgctcttcagctcttgagcatgtgataggagcattttcgtatatatgcgtgagaacggtgggcctatagcagtgtgtacatgagctttagtattgtgtgtgctcgggaaaatattgcaaccatataggttgtgttggtaagttatatactccctccgtaaaaaaaaatccaacctatactatttagatgggacataatctagtacctgtccagattcattatactactttcaacttttctatcacatcaaaactttcctacatacaaattttcaatttttccatcacatcatttcaatttcagtcaaactttcaattttggcgtgaactaaacacatcctagattagtttctttgggatggagggagtaggttttttcttaactcctactacaacttttattgtactttccagagaagtctttaagagtcggaaaacaattgcagttcattcccaattaataaagtacactattattttataaaaagttacatggaaaagatcgaggatggctatgattgatcaagatgaaaaagtgtgttagaaaattacatgaaagatagaggtgcagaagttactatatattttgctacaagatttaaacgatacatgttcttagattttgtgacggatggagagtggactgatcgagggatgccagtcaatctagtactccctccgtcccacttactaatgcgtggtcaaacttaatatagccttcaagactaatttttttactttaaatttctcatatactataatatttatagcaacaaaatcataataatatgaaagtaaatttaaatggtaattaataatattattttcatcaaataaaatttaatttataataaactatttattgatgaaatatgtaaataagatttacctctttaaagagttaaatcttaagatgcgttcgcgtcttagtaagtgggacaagcgaataaaagatgctcctttcatacggttgctaataacttgataaactggtcaagtcggcgtagtgcatgcggtgttgtccactggccaagtggccagcttggaagttttcttcctacccaacggaagcggccggttgttcagcgcgtatgttcgtgtatgtcatgcttgccatgcatgggccgtcgaagaaatagtctagcgtttctcttttctagttcaaccaaaagattccgtcggatcagactggtcttgtcttcgttagagtgaaggtagaacagtgatcagttctttcagaaaaagaaaatggaagatgaagtgactgtgaaagacagtgatagtacatacaaataatgacggagccaagaaattttgtaaggctattcacaaggcaaagatgtgttattcagccccgaccaaccacgtagatgagctgcttgcgtgaaagagagaaataggtggagaccatgttttcatggggttttcatgccctttttagtacctggaactttgtcagtttcgtcagaaaaagtgaggaagtgggtcgcttgcgcatgactggaagcaggagagagagagagagggaatatgatggcgaagaggggagggactcgccggcgcaggcgaggagggcagggcggcggcgaccacgacgccagcgatgaagcccctgccacgtccatccttgcgtcgcgccctgatgagccgtcgccactggatctggcgagcttggccaagcactcacgccgtcgtcacgactcgccgccgcaccccgatgagccaccaccaccggatttggcgagcttggccacgccgtcgtcgcgactcgctgcagccgcgcgcccgcgcgtcgtgcctcgacgagacaccgccactggatctggcgacccttgccacaccattgtcgcgactcgttgccatcgcgccatgccccaactcgccgcaatcgtcgcccacagccagatccggtgagccccgacttgcaaagctccagtcagcggccaccttcgcgaggaagacgcaggtaaggcggtggtggcatgcgagaagaggagaggccaagtccactgccaccgtcgagtgccaagcccgtcaccgccaagctccatatccgccatcgccgaggcgggcaggggagggaggcgctgacgaggtcactggaaggtgagaggagaggaattggttgaggaggggatgggttgggattttggggaaatgtaaaaaggagagagagggaagacgaaaaaatgtatgttatgggatccattataattagctttgcactgtgagttgagttgctttgtagaagttctatccaatatatgacatcccgggtttggtcttggtgtgcaacgcactgtaaacgctatcaagtccataaaaaacataaatagacaattataggcttatgggtatagttaattaacatacgtataagtaatttaagtcccacggctgcctcggttttatgggtcttagaaaggtatggaaaggtatattttgcttttgatggaacgtccctttttcttcatgtcgttaagaagattatttttaagaaaatattgataagatagccaatatgtgatgtgctgcttcaaagtttaaatttgacctatgtaaattaaaacaataaataataagtatgattgctaataatacgtactattggcaacatatttgttatttttgtttccatgtatatgttgaatttgagcttgcatcttttacggagtgccttaccaatttttttttataactttttaggtgataatggcataaaatgattggacatcctcgagaaaaaaaaagaccattcccttgtaaagttattatgttggatatatatccagtagcattacaaatggttaatcgatgcgtagcattttcggttaggtagaatcaagatagatgacttgattaaaaaattcaagcgcacgattttctcacttttaatatatactgtttttggctaagatatgcaacctgcatccccagtggtcttttcttaatgccataacaaatttaaaggcctcacctgcacgcttgccaatcgaacagacaacgttgtgatagtcacgggacgaacaattccaattgctaacgcgcactataatacggaagtagttgaagtgttcaaagttctttggctttatatatatacctaaagacttggtcaaaattaaactcagatccgattatattggatatcgaatcaaaatttcactttcgagcttatgtgaataacggaaattatgtttccagtcaagcatgttgtcacgttttacaagggcattaaccatgactataattgactaaggtgaaaaatgcattcacaaacacaccctgataagatatctcaattaagcggtggaggaagctcgatccccggcaggtcggacgaacgcttaggtttcgccgttattgtcttcactactgatagccgtcgacacttataaaaattagttaattatctgaaaacaatgctagtcacctaagcttgatggtgctgctagctcttcatcattgtctcaattagtttattgaaggacacacatcactagtttgtcaatttcaagttctcctttttaaccattcttttttatcgatgggatagtcaacatcttgaataaagttccttttatatagttataataaaggttttagaaaaaaaacaaattgcatgatatatatttccaataataaacgactggttatcttcctctcctaatacatcctaattaagtgatgcagcaagatgtgagatatgtactcgaatataatcacatttcccgcgtgagaccacatcacgttttttttcacgcttaattagttttgtacattattatcttatggagtagtaatttaacttaacatatagtcatataccagtaattaactacgtccgcgaactgacctcaaaagtggaatccactgtcaccaaactcaccatgagttcaccacccctctcaagtagctagattagagaaatagtagagttaggttcatgaaaggctagctactaataatcaaacatcggcacagtggattgttcaaacatatatatatatatatatatatatatatatatatatatatatatatatatatatatatatatatatatatatagctcttgaaaatgagatgcatggagcttaattattggcattgtttagtgtcgcaacgcgctctatatggcaccgaccacgtgattagtattacatcgtcctgattgatcaagtgctatagacttgttcgatcatcctcatttgcttgattacataaagtattatttttagcaccactatgcaattagaaaaaaaaaaagagctcgctgatctctcagccaccagttagttaataagcttgattaggcacagtagttagcttaattagctcggcagcttagctaagctattgtgtgtttcttgctgttaaggatactccgtatgaaatagccagtggccggcctagctatagctatagctattatctaggctgtttggtggttcagtactcctccgtccacacacacacacacacacaccatgcgtatatattgcctacggcagtacggggtggccaaaaagttgaagcatttctggattattggcacgcgataattaattaaactaaactaaagctgggtgatcttagtttggcctttttttataagagagagagagagagagagagagagagaggagtttgtttagttaccttcagaaatgtgaagtcaaggcgtctaagcttagtgtgtgacatgtgcaggcacattggtgcagtaagccagtaacacgtgcaagcaaatagccactactctctgagtcacctttttcttaatctaaatttataatctgtcgatcgaacaagtgcgcattgccgcattggtaatttgatatggctcttatatgtccgaagtacgtccattgggcgtgtcccgatccgccgtcaaacaacagagcgtacgcacggacgtaggcaccgtcgcaccgaccaactagctcgccgcaagctgcgttcgatcgttagtactcgctctgttttaaattatggcgtatgtattttttttacataactttcaataacatattttaaatattaatttatttcatattatattctcaactaatatgaaattaacatatcaaatacttcaaatatataaattcagttatataaaatgcataatagttagcatagatatgattagtaaattagaagttattgagtttgaattatatgacgaatgagtaatacgtagtactagttggaaatattttcccttcacacgtaaaatgcgatagtatattgacatatgattaattaaggattaactaaaaaattaaaagattaaaagataggttgatatgattttttcacagtaagggtgtgtttagtttgcaccaaaattgaaagtttggttgaaattggaacgatgtgacgaaaatttggaagtttatgtgtgtagaaaagttttgatgtgatggaaaagttggaagtttggagaaaaaatttggaactaaactccgcctaacttatctacaaaactttttaaaaataattacattatttagcactttagaacgagtggttatggaaaacgagatgaaaaatatagagtttcgaacgagagtgtccacctcgactactccgctcccgtttccgctagccgaccaggggaggaaagttggagtgggctaatcggtttctgaactaggccggcccattcagagcttcttgtaagcccagtaagctttgagagggacgggcccagttagccagtagggctgatttgggaacactaaaattaaagcccgcccctgtcttttatgggccattgttttaggcatgctcttaatgagacaaaatacaccttatttttgtatacgaatggaataggattttcagtgaagaatgatgtttgttgatcagtggatggttttaaaaatatataatacgtaacgtacccacatgtactcttttactaaaaccgtacgttacgtatttgcatgatggcattcgctagattacagctgtttgtataagaatgtttcacataaagctttgacactcatattttactgtcttcttttatttcgttgaagaattcttctccatattctgtaaaaaaactggacattcctttatatatattacgtacgtaaagtacccacatatttggtcagcttacttattctagcttatttgcacgcaatgtcaacactgatcaagacactttgtgggctccagctgtcctagcttatattcatgttaaatttagcgttgattatatccatgtcacagcaaatttacctaattaaaaaaatatcattactatttgtgatatatgttactcctacgtgctattatatttttgtaaaattgggattatgctatcgccatcaaaattcatatcatcttatttcctaaacccattcttcattctctctatattctgttcatctccccctcctctcttggatctggcggccggagctctatccaattacacgtggtgcacatttttttttttcaaatcaaaacttatcaccaaaccaaatcagcactgaaatggtcctgcgctatatcgaagcaattaatagcaaacaaggttgaaactcgacaaggaattcattgcatgcatgaacacacatttgataaccgatcgagcgtagcgcaagccccattcaattcacggaagaagctgcagaggattcgtcaaacaagcatagattcgtcgcagaacaaacaaaatccagaaatatcttataaactgaacccccaatctggatcatttcgatgtacaccaaacagaacccaagcgacagcacgtacggcccaaatccagcccacgctatcgctgcgccgttggcgacaaggcactcggcggccctcgcgtcgtgccagccatggacatggagcgcgcgtgcggctggcgtagcttcctcatggcgcaacgatcgacgtcttcagacttcatccagcagcttcctcatggcgccggtgtcgttctggtgcatatgtgccacaggatcaacgacgtccgcgccacgtactattggacggtttcatggagcttacataaatactccatataatgatctcatatggggtcaattcgagatcatactgtttgatctagctaccgttatttgatctataaattctactattctagtgttaacctctccacgaggtaaatactagtacgagatttacactctcaagtaagtgaaaagaggaagcagctgctagctttcaatttgctgagggcactgaaacgcgtggtgttcgtcagcttcgctgccgccgtgctggggctcctcgcagccatcctcgggttcgtcgcggaaggcgccaagtccaatgcaagtttcaccttcatctcgatctcacttctcgataagttcttgtgtgtgtgtgtgtttgaatttgacgtctcgtgtttttttctgcgtggatcgatcgatggagatgcagtcgttcgtgcggttcgacgggaggtactgcgtgtaccgcgccacgccggcgctcggctgcgggatcgccgcggcgatgttcgtgctgtccggccaggccgcggtcaccgcggcgagcggctgcttcggccgctgccgcgcgcgccgcggcgaggagtcgtcggcgcccacgccgggcgagcagcgcaggcgctccgtcgccgcctggctgtccgtcatctcgtggtacgtattaattcttgacttgttgccacagcatccgcacgcgcgcgcgcggcggcgatgaccattgtcgacgtcgctgcagggtgttggtggcgacggcggtggcgatgttcctgtacggcgcgtcgcggaacgcggccgtgaggagggggctcgcggcggccgcgctgggccggcgaggcaggcgaggcaggcgccgcggcggcggccgcggccgcaacgtgtacggctgcgccgtcctcgggagcgggctgttctcggcggcgtccgtcgcgtcgctcgccgcctccgcctgcgggatcgccgcctacgtctacgtcgaggcggatggtgaatcattgacactcacgccgacgacgccgccgccgcggcctggtgggttcgccggggcgccgggctcggcgacgggtggtcagccgtatttccagccgcaggtggcgtacccggccacgggctacgtcgccaaccctgctgcggctcctcccccaccaccgtacggcggcggcggcggcggcgactacgccggctatgtcgccaagtcgcgtgaaggcacagcttgagattgccaaaaaaaaaaaaaaaagcgtcgaagtaagatcgcgcgagaggttgccaagaactctgcctttgaactggtctcgtttaatgctgatcttttcctcgcttgtgtgaaatttcattgtgttgtagaagcaaatcgtgtatgccacactacatgacgataacaatcttcatgtcttggaataatgaaacttgtaaaaaactgataggtcaaaaatgccagatgcgttaatgcgttattatgggtaaagagatgagtagtagatgtcgtaatggctttttattggccatgcatagtcaacgttgagtttattttcggactccctccttttcatattagagtcgcaatcctccaggctcccgagtccgacctggttagggtttgctcgcctacaaatcgagacgccgccgccacctcccaccacgtacgatccccacccgccgtcgacgacctcgaaatcccaatcgccgcgccgcgaattagtcgaagctgcagtactgcatcgccaagctcatggcggctgagggcggcagcgcgttcgctgggcagaaggtgccgctcatcgacgccagcatggctctcaagatggaggagacgtgccccaccccggaggaggtgaagcatctctcgccggccgacgagcgcctcgcggcgaaggagtactccgacggcgagctcaacaagtcccacgccgaggtctgccgtgaagctgacaagaatagcgccgcctacctgctcgccaagcgggccaagctccaggctctgatcaaggaagaatgggctaagattgacttcagccgcgtccatgtcggtgactgggacgaagaagcaggctgctacaagtagctagcccacccagctctgctgctggaacattggacactggccttattctggatggatggatgattcgcctggcccttttttctctaattagctctactagtattagctagtatcagttatgtctagctgttcgatccatcgttcgatttgtgatgtttggtactagttactaatcaatgggtatctatgttatccaaccatccttatttacgtatctatgtgatactatctgtgataataaaattataagtcgttttgactttggtaaactatttaaactattttaagtttgatgtaaaattttcaacccaagacaaatatattgtaaaaatatattcaattgttgatccggaaaagttggaagtttgtgtgtgttggaaagtttgttgtgatggaaaagttggaagtttgaagaattattttggaactaaacacggcgataatatgaaacggaggtagtatgcatatagggacagagccaagtataggcataggacagcttaggcttaggctcaggctctaggattgtctacataattattaagtactcttaaatcaccacaaaaaatttaaagaaatctattaatgcattagttggttcgctctagactttaataattttctagctcaaccctacatacaactctaaccatcacggagaaaactcgtcatgttacctttgaggaatgttctctatgtgtacttagtctttcatcgatctctcaaagtggctcagataggcattaagaaaaagctttcttcatttcataatgcaaatgatgctaaaatggttaaacattgttttaggtacgtacaactgaagttgtgtattaccgaaagcccatacaagcctcttgggtatttctttaacctaatattatgacaatatcattaaccataaatgagtctataataggaatacttttaggggcgacctatttggcatctagcgaaaaacatctaaaaatcttactatagaccattggatcgcttttgggatatgtgcaacaacccttaacactaaccctcttttcttcctccctcagtcccaccgtcatcatttcgcagactcgatccaccaacctcctccaccaccaccagcctagcgtgtcgttgcttgacctcaccagcaccaacaatgttggcggggtccattagacctccctttccctttcctctccacgcctttcatccttcccggattgagcgatgtcaaggaagccccgcacgcctctcccccatctccgacaactcccttgccactagagacaccactaccgcccaccgccatcctccataatcgtggttccagcggtgctatcaccgtctcgcccttctaccaccgccaatcactaccgggttgtcgccgctctggtatccctttaaacctgaggaatccccccccctctcctcttcctcttcccttcccctacccctttgtacccgccccctaaacctaatacctaattggtcaagggcatcgtcgttgtcaagctcgcaagagtggaaggagaaggtcacggtgcacgaatctcagagccgatcagagcatccaaattttgaaagatggggtttcgattatgtccaatggaggttagaaattctgatactagttttcatgccattgattttttttattgttgatctaccaccaaaaactatcttactttaacgttggtttaaatggatcgggaagaaagatttccaaccatgcttatagagtcaaacagtaacaggaggtcactataggacgggccaaaactttgaatctgtttgaatttaggaaaactagaggattttccgtgtaattttgcacgaagctagattttaaatgctaaattgggtttgatataaaaaccttaactcatgtttccaaacttatataggtagaattataaaatatattgtgtacacaataggtttatgaagtacgattatatctgatatatacttcctcagttttttaatgtataacactgttgactttttaagatatatttgatcattcgtcttgtttaaaaaaattatataattattatttttaatttattatgagttgacttatcataaaaaaatctttaagcataacttaattttttatattcacataaaaattttaaaaaagtcaaatggtcaactttttaaaaaaaaaagtcaatgacatcgtatatttaaaaaaacagaggtactatagaattctcaaaaagagccgagaaagtggtgaattacaaatatgcccctctttccccttcatctattattcctcccttcctactctactccctcgacttctcgagtctcgattctactctgtctccaatctacgcagcgaaagccggcgccgccgtctcctcgagcgcgccgacggcggagaagaccgcaggcacggcggtgtctacggcctcctccccttccttccagacccccgccacggccgcgccgcgccccgccctagcctccgccgccgcctccccagtccggccgcctggcctctccacgcgcgcacggccggggcgagcaggtcttttgggggtgggcgacgccgcccgtgccgcggcctcctcccacctgaatccatcccagctcgcgccgaattcggaggtactcgtctcctctctctcttctctcgcagcactcccgtccacttcgtgagcagagaggcgtgcagtaggttggggaatccgtctcctgactcggtattgatttctttccctccaggtgtcccgtacaattccttctggatttccatcattccatgatgcctggtggattgtagctgctcgtgtttccacgaaagaaggtttgggggtttatctccgaatccttcttctgggagggatactctaattggtccggtttgctgcggaaatctgtggagctcgggtagatgctccgtgttagtttcgccacagcgcactgcaaattctagtggagtgaagaggaatatggtagaggggttgccggcggagttgccaatcgtggacgtggccgctcgtttggatggcaagagctcggagctgccagagaatggtgcattgctgaagggtgctgaggaatcccaggtttggaatgttttagcttactcgggaagtgccaaatatatttgcttctattcgaatgatttgtgatgctttgtttgcttgctaggatttgggaggtaatcccgtggcggtgttgacgttgcacgaaggcaaagaggtgatcctcgtcgatgacaatgatagtgagcaggaagacggtgggagtggcaaggtggatgagaatgcgccccgggtcggattgagattcaaaacttatgatgacgcgctgaagtactataagcaatatgccgcggattctggcttttcagcaatcattctgaagtcgtcctacttgaagtcaggggtgtgccggaggttggtgcttggatgcagtcgagctggaagagggagggcaaacgcatgctatctgtctagagaatcaacgaagataaattgtccagctaggatttcgttgaagctaaggcaagatagatggcttcacattgatgacgctaagcttgatcacaaccatccaccgaaccaatcctcggtgtcacatatgaactgttataagaaattgacagatgccaagaatgaggaaactgcttcaagatcaaaagggcgtaggaatgttcccataggtgacaaagagcaagggagctttactgagataggaaggcttaaatttggggaaggagatgatgagtacatccacaagttttttgggagcatgcagaacaagaatccaaatttcttctacttagtagatttggacaaacaagggcgcctaaggaacttgttctggagtgatgctaggtcacaggcagcacatgattactatggtcgtgatgttatttactttgacacttcatacttgaccgaaaaatatgatctgccacttgtcttctttactggggtgaataatcatggtcagcctgttttgtttggtactggattactttcagatctaggtgttgacagttatgtgtggttatttagggcattttttgcatgcatgaagggctgctacccagatgcaataatcactgagcattacaatgctattttagatgcagtgagagatgttctcccccaagttaaacaccgcctttgtctgtatcgtattatgaaagatgtagcagagaacttgaaagcacatgcagaattcaaaacaattaagaaagcactgaagaaagtaacctatgggtcactgaaagcctcagagtttgaagctgattggaagaagattattctggagcatggacttggagaaaatgaatgccttagttccctatatgagcatcggcagctatgggcacccgcctatctcaaaggccaattctgggcagggatgtcagtttcacagcgtggagagtctattgtttcatactatgatgggtttgtgtaccccaaaacttccctgaagcaatttttcagtaaatatgagatcatattggagaacaaatacaagaaagagttgcaagctgatgaagaatcctcccataggactcctttgactgtaacaaagttttacatggaagagcagctggccaaagaatacacaatcaacatgttcaagaaatttcaggacgagttgaaagcaacgatgtattgtgatggtatgccaactaaagttgatggacaatttgtcacctttgtggtgaaagaatgctcatacatggaagatggaaaggagaaggagggaaggaattatgaggtttacttttgcaagcaagagcttgttaattgtgaatgtgaatgtggtttctttcaattcactggaatcctatgtagacatatattatctgtgtttaagttgcaggagatgtttgagattccaataaggtttgttcttgatcgctggaaaagagactataagaaattgcatgctgatgcgctttgcaaaaatgatgaaatgctacctgatgtgctacctgatggcataatcgagcgtcatgatatcttgtttacacagtctcgtcaggtgcttaatctagggttcatatccgagggtaggtaccttgtagctctgaagttactgagacaagcagaaaagactcttctggatgatggagatagaggcaggcaggcagggcttctctcgtttgaggctgaagcacctgaaaatgatgaagggatttttagtcctgagttttcagagggtgtaaagaattctcagtcaacaaatgcaaagcgtcgaggtcgtccaacaaagaaactaattgaatctgattctgataccgtattacggccaaataaagagcaggtctatattcattcttggggcctaaagagcctaagatccatatttcactttctgttatatgaatatgccttcattgatttttttttttatttctgctgagcaggattttctacggtcatcttttgtcactgatgagtctaatatgattcaaggggcaccctcagcctcacaccttgaaagtcctcacttgggagttgatttgatggtacttgttacctttgcctttgctatctactgctattatttgtgcatgtaaatatcttgttctgaacttgcacaggaaggaatacctccaaacctttcatttaatcatcattttggtatggatgttaatcaccaacatcaagtgcccaaccaaccgaggatgctcccaagcaattttctgcaggtttttaccatacaactgctcaagcctttataccataatgttcatttgcactctttagttcatatatcattaaggatgaactcataacttttgatggtcattttccttttgtacattagcaagttactaactattcttctcactgtgcatatttgtctagtacaattaccaatgcctttaattttaaataaatgttgcaggcccaggcagattcccagggttatggaaatcaatgggctttcccaacattgcaggtttgtttccttggttcttgaattgcgtaggtcttcctacagatgtacatatataaggaaatgacatatatggctatattccaggataattcaatgctaagaactgcagcccgaagaggagtgtagaccctattttttggctctaattacagcagtagaattctaggtaatgtctgttttgttcttgcatcatgccatatgcttcagattttttttatgtacctgtgagcattctgggattatttttcttttttacttagatacttgtttcttttcagttcaagaaataatccttatcatttactgggcgaagctttgttacttttcaattttatatatgcttgttacagtacatttctttacaaaaatgcatgtggttctccctccatttggaattgcctgccattttaggccaaatcacaaagaccaaggtgtggttaattctttcatctgggacctgattacgcccttcaatacggtgttctctctaattaatggtagtcaagattactccaccattctgatcgtcattaaatcctagagccttgggtgagcatagatgagcagcaccttgccgcatgtctgagcaagacgtcataccagctgattttttttggatacgcataatctgtatcaactaactttggaacatgctactcttagcttatgatagggaattaatgaattgaattagatccaatgccatttgtgctagctagcattttacaagggaaatttaggaaaatactgcctagaaaacctaaaatgacaactatttgataataaaagcaagattgtaagacaacgttgaaaaggatacagaggaaatatctttctatacatacaaactaaggttcatgaagtccattatgttccttcttaggaagctcttggttcttgagtttttttggcttggcattctaatgtctgggtcacaaatattaatgctgtgaagcagctaagagaatatgcatagtctgtacaatttttgggcataaaccttatttgtgaacttacaatttgcaattttattacctaacccttcacatgttaatatgcacatttgctgttgctagtttttatttcccttttccctaatgataccaaacatcatgtgcaaatatatattctctaatcatatgcacggattgaataaaaagtatagaagaaatcttatattccgctttaaaatataaagtcttctatataatctagaccaagggtagcatagagccatgcggtcttttttggtctccttgttagtatttacacaaatctaatatggcattgcagttttattcgattggagctctgactgtttcctctcactattaagcaaaaatcggtagactgtcaagaatatctggattttcaatatgtaatcaacagttcctatttaacctatacaagatccgttttgacttgttcacaaagtttggtaacatcggtgctttgtctgaaatgatcggatttgaaggcttgaaattcttcccagtgaagaatcatgcatcatatgcatttgtcatgccattttagctgtgtattaacttcacattcgtaaatttcagataccatgactcctccggcgctcgtaattactaccttaactaacctgaggatactgaggcggcagcacattataagacaggttggattacttggtagatgaatccaaaggatatccattgtaacttttttgttgtttcctgactgttagctgctgttactggtcatatattttgaccccaagttgtacatagcattagacatagtcaatgtgtacattactcattgcggcagattggtgaatcacatgatatcgagtgctgccaaatatattgatcgatgttttcctatacaattctagttaggcaaagtttgaaaatgggcatcactgttggacgctattgcagaaagccaaaaacacaccgtgaaagtcctttttaagacacgctgctgtgcgtgtttgctagtactagaaatcactgcatctattgaaatatattgtttttgtttgtgttagagaagaaaattttggaaataacactaatgtccgtatcttcttccacacttttcaccttctatcatatcattacaattgacatcccagtactacgaaatgccatattgtcggccatttatccattatcttcctcattttcttcgtttttttagcaaccacttttttttctcgtaccataaggagaaattagcaagcaacatctcaaactagaaagaaatgcgtgctaggctgcgccgtttgaagatgatgtgcatgccaccattatgccacgatgtcatgaactatgagtgtataaaatagcacctggtgccaacatatacataatattatacacacacacctccttattaagaaaacatattgttttacatggaaaaatagtatcattataatacattagcagaacaaaggacatgcataactgataaactattggagtatgccaagaagtaacttacatatgtagtaatgatattaatgacaaaataagataagtaatatcgtatatagagaggtctcgcatgtacagtctcttctatgtaacataaatcatgaccgatagagaaaaaaaaatgtcgcaaatcaccaaaacggcacaaaatacacaccatgatatagtctaaatataggttttgggatacaaatatcacaaaaaaaaagtagaaatatatgtgtttttcaagagtagcaatgttggctcggcttctgaaagatgattttctgatcttttggcagtaactgaggtggtatcactcttgtatgagtttctcctgtcacctaaaacacattatatacatcaaatatgcatcagaaaggaatctcctggaaaaaaaaattagaatagccaaaattgatttgcaaaaataacgcaatgttattgcaaaaattaatgaaaaaaaacgtgggaataatacacactcacaacaataagttactgggattatttgtacttccaatgttagaggctactttatacgaagagagaagaaaagagaaatagggcatctttcaacacatgatggccatggattaaaaagtgccacaatagtaagtataaaagaagtattatgtcatgacaatggtgcaaagacaaataagttgcctgcagtcttcatcatttgtacattacattctaaaaataagagctatcttctaaaagttttttgtttggtagaatataagtttgtaggacagtattacataactacctgcttcaatgtccaatttgtcgaatatgaggcagcagagtcatctgaaacaccaccaagcaatgataaaataattataggcttcatttcctccatgaccttatcaaccttcttcgttgaactggaccaacacaacaaatcccatgaattaatctaaccactcatcaattattagcatgtacatcatctatatatctgcatcatgtcatttctggtagaaacatttgcaatcttgataaaaagtatatcattccaatggatatcctgttggcagaatgttttcatataagctttctattcatagccttgtagtgatccctagcatgattttttttttggccatctatgtcattctatcaagctaggtaaagtggcatcactatattgtacaatatataatgtaccagtagaaccaataattaacatggaattttttgacaactgaattcatatgaaataatctgaagtaaagaaaaattcccttaatagaagtgaggcataattacatatgatcattagaatataattaagcttttgttaaccgaaccatggtaaagaagatgaatggtgtcctgcaagatgaatctccccgctgaaactgtaagtacctctctttcagaatagaggtagtaacaacatgaagcagttaaagtgtttcctaaaattaaacaatgatgtacacgaaaaatatggaaataaataagaaatgatgcacctgcatattgtttgtgttcttcaaacttgaatccataaaaccgggcatgaaccatgcatctgatcctgccataagccaaaagaagcaaacattaatttaaggaatatgataccccttttaatcttagttaatcctaaacagcgaacaacctagtcgagagagaatgaaccaaccccgcatactacaaaatcataagagcatttattaacttatgacagaattattccttaccttactgcatgaaagaatattcttccccatactaaatggaagcaattaaaataaaaaaggaatcattgggttgtagttaaaaaaaaaggaaattgttgggatctagctagttcatctaataattgttgacaaatttcacaaggagattatcgattgaatattgcatagtacataccatgcttaacagtgaggacaaagctcgatgggtccctcggcaagatggcatgacagagtggtagcacacaagacaccttctctcttatctgtgaacaacacctcaccctaatccatcagtcattcgatggaacctaagggtaagatgatggatcaagtaaaaaacatcaataaatgcaaggcagatgctaaacagtgagtcaaatcatttccttacactgttgttttttgtgtgcagcagcacgaagcataacgggaagcggaggatcatgacgtgatggggacggttgatggcgtcaatctttggcgactgcaggagtcgggaacccgggatggatgggggacgcacaaccaggaactcgaaacgcctgtggacagagaccacgcgagcggcgctgcggattcagttgctcgcttgctgctgcttcaccatatcgactcccaccgccagcttgtcccattgaacagtgatccaccataagcttgattcgctggatgagcacatctaccccctcaccggcgccaccggcaaggagctgtatccccctcaccggcgaggcgtcggatcaaaaatacccgagaagcccgaagggctccggttggtcgcgcaggggaggaccggtgaaatcacatagctagagggagggaaggggaggggagggaaaaggatggaagaaggagggggcgacgccgcaacgctggtgggcaaccgaggcgtcgacgcttccgccgccgtctctgactctcgcgaaagaaaggcgaggagcgcgaggcggggctgggctgagtgcggctagggttttcttctattcatctgcgcgaaaaacgatctgacccgtccaatatggtttcgccgatcctatggatcaggaagagcagccacattaatggccagattgatcttatcccacgatcgagtggatcatattaacctaaactgaagtgtgattaagcacaaaagaaggtcttttctagaaaaaacaatgacgtggcatggctacctctcaaccattcccacggcttttaagtaaacacgtatgaccaatcatcatgttcaaaaaacaaccacgaaaaaagaccacgtgccttatcttttcgcatatggttatacttattagccaaaaattgaatttcaaccttaaattttgaattgattttggggtttttcatcgaagtttatttttcagtatttgcttttatattgttaacaatacgtatataaaagttatattcataaattagtttttatttgcaaatatgtcgtttggcttattccatgaataagcgaaacgatggggctgcacatcaacacttcccaagcctcgtcctataggacaaccaactcaccacctccatctcccatgtcctctcctcacaatcttcttgggccttgccaaagtcacaaaccttatcacttatcctcgcgttctctaacggttgtctcgatatcgccgcaactttgtttcattttagatataccttgttcttctaaatttgtttctatttcttagagcttgatgtacatcattcaccatactagattactagtactaagacttgcttttttctgaattacttgacaactgaaacacatttcctctattaaaaaatggtgaaggagcaaaacgagataaaggggtagaaccatggaaacacatcatggttgtatttatagctcttctatcatagtaggtgatgggcacgtcaacatctcaagttctgaatcatgtcagagtagctcttgaatgttttgggctttttcagcaggtgaggaaaccgcagccgcacaccattgcctacttcctgcgacactattctggcttgtagctcgacaaccgaacatgtcttttttcccctaaaattcttgaaaggagtttctttagtattgttacccgataccatacacatggcagtatatatatcatttagatcttagcgctacgaatgtaatttaaatctttgcgcgcaatttctatacattatttttttaaaagaatatttttctctcgagaaaagaaaagtaaaatttgcggggctcccaaaattgctagcccgtctccctctcctcgtttcctctacctctgtgactctcttctttttttttcgtcagtctctcctctattctctctcctgtgtttccggcggaggcacgagcgcacggacagcctcctccccccgcctccacctccgcgcggtcgccgccggcgaggaggcggcgccggacgagctcctctccttccccgccacgccgtagcatcctcctcctcccccgcgcgcgcgccgctgggcgagcaagtctgggggccaggagcgagcagcgcggcgcggcgcggcccggccaggcctctcattccaccaccactggcgcccatctcggcggctcggatcgaattcagaggtgattcgagagagactcttctctcgtagcccctccgttcactccctcctcctcctcgttgtctcgtgttccggcgtggcgtagattggagacctgtattgattttttttttttgcgccttcgcacgcagtttcgtcgcttgctctccgacggcggcgatgatggaggcggaggaggcgttccctccgcagaggaatccccgccgcgcgcggcgccgcgacctcaacgcactggtttgatccgattgaccccctcagtttttttttttaaaaaaaaattattgttgttatataactccccatcggtttagcggccctgtggccctgtcattgtagacgtttgatgtatgcagggtttgaggttttactgtgaaatttgactctcgtttcgaggttttacctggaatggattgtctcgattttatggggggtttagggttccttacgtgaatgaatggctgtgtgtttgcagtggttcatgttctagtaaggaattgtgatttcgggtttatatatttacagcggcaggttgtttgtgagtaaaggactcgaaggttaggatttttttgtagttccaatttgttcgtatttaggctttactgttttatattggtgagttggagtgacattttagtttcctgaggcagtttagttcaacccattatactagttcatcctcgattggttttgtgtgttgcaacctctgactattaggatttagtacttaacatagatgactgctccagctcttttaatgggccaaacgaggtatcatgccgcgccatcctgatgatcttaaatttgccaaacaaagtatcatgctgtgccatcctgataatcctaaatttaggacattctatatgtgcaagttcaacgagtagtgattccatttctatgttgtagagaaggttgattttttagttgtcatcaatttgtataagctggaagacactttaggttttgaacatgttgcatttgctatgttctgatgattgaggtattatttcaggatcccagtttagaagagtctgatggagaggatattggtgttccagaagttggcatggtgttcaataaccacacggaggtcaaccgattctaccgaaggtatgctcgccgtgttggctttggggtgtctgttaggaggtcctcattttcacaagagggcacctgcttatatctggagctcatgtgctgcaaaggagggcggccacgttatgagccaaagttcaggaaacgggcctcttcaaccactaactgtccagccaagatcagagtaaagctatggggagataaattgttgcatgtagagttggcaatccttgatcataatcatcctgttagcccagcaatggcaaggtttttgaactcctataagcagctatctggccctgcaaagaggcgattacgtatgggtggccctggagctatgccagtggaagaaccaagcaagatgcctgttgataagttgggtgcacttgaggagcttttgtttggagagagcaagcaccatagttttgttgagaggggccgcttgaagttccaacctggagattcagaagcccttcggcttttctttactcgtatgcaagccaaaaatgcaaacttctttaatgtcattgacttggatgatgaaggctgtgtcagaaatgtcttctgggtagatgcacggtcaagatccatgtatgagttctataacgatgttgtcacacttgacacatcgtatgtggtcggtaaatatgatatgcctcttgcaacttttattggggtgaatcatcatggccaatctgttttattgggttgtggcctgctttcagatgaaacagcagaaacctattcatggctatttaaggcttggatagcatgcatgtatggtaatcttccaaaggctatcatcactggccactgcaggggcatccagagtgcggttgctgaggttattcctggagtccatcatagaatatgcctatttcatataatgaggaaggcgacagagcgattaggtggtctgtcggagtacgcagctatcagcaaggctttccaaaaagctgtatatgattctttaaccatagatgagtttgaaggaaattggaatgctctgattacatacaatgggcttcagggtaatgactggctaagatcaatttatgagtgccgatactcatgggttcctgtttttcttaaagatacattttgggcaggaatgtctgctacacaaagaaatgaaaatatcattcctttctttgatggatatgtagatttgaaaaccacattgaagcactttcttgggaagtatgagatggccttgcagagcaaatatgaaaaggaggcccaagcagattttgagacattccataagcagcgcccacctgtgtcaaaattctatatggaagagcaactgtccaaggtatacacccataacatcttcaagaaattccaagatgaaattgaagcaataatgtactgccatgtatctttcattaatgttgatggcctcatatccacattcgatgtcaaggaatggattttccttgaagatggtaaaaggactatgagcaagatctttacagtgacaaataacacagataaaaatgatttaacttgtatctgtggaggtttccagtttaatggaatattgtgtaggcatagtctctcagtcctcaagtttcaacaggttcgtgaaattcctccacactatgttcttgataggtggaaaaaggatttcagacagttgcatgtgatggggcgtccttcaagtgatgttgttccaaacaatcgtgtggatcgatatgattatttgtcaatgagatgtctgcagctagttgattcagcagtcctatcagataaatatcgtcttgctttgagattggtgagggagatggagaagtttatgttaaacagcaacacgcatgatgatacacaaccaaggatcaagtctcgcattcctaaagcaaataaaccaaatacagtggttggtcaaaatctggtaaacgttggcacttacaatggaaatgataggcccaaagcaacaacagaggtatctgttcaacctgtagttaacattgtaaagatgcctattatgttggaagcattatggtaaataactatgagaataatcatcttaacccactgcctatctgattgatcttattttgcaagatgcaggcttcttcattaacacagggattggatgtccagaaggtactacatttagctatggcatgagtaaattttggtgcattatcctctttataggtgacatttgttaataaggatattgatttctatttttttttaactatagggaggagcagaaaagggcatagttcctgctggttacattggactgccagctaatgttcagcaattcgtaggcagtcaaacagcgattcgcccaagcattgtgtatatggttccggtatgtcaaagttacaaatgactatatctgctcaactgtgccttgatagtatctacagcaccagaggaccaaattctaggatatttggttgcttttcttgcacaaacatatgtggattcatacaactcatctttatttgttaatgcataagccccaagtactcatcatttttcaggatatgtgctgtgaacttgattctttcttatttaatttttcagagtggtgttgacccacaggcatttggaaatggtgttctgatgcctgttgtgtaccagcagatgttccaggtttgtatatttttgtgttaggacttgagaagttaatccgttcgtcttgtaggatgatttcacgtttatcgctggtatatctaggtaccccagcagccaaatggaaccatgccagatacttcagcaaatggaaaaaggaagcggcctcgtgcccagaagccaacagaggcatctgaacagtcaaatggaaccccggcaacaggacccacatctgggtagattgaacagtttctcatttagtcagaactcagaacaggttttcttgaattctcacccctgttaaccttcattgtgcaatcgttcattgagtttgttagaatctgataaccacatttgccataacgttcacatattctccataactgcatcccaggtctttgtaaatatgcagaggaagtgaagagttgcctagagaacttcaaacggatgctagcactaacaaaagtacatcaaatccatcttggctgtgatctgaagcctttgtgctgcagagattgagcacggccaagcccaagcgccattcttcatttggatcatcctggagtgaagtccagggttgaaaaatagccttcacctcatttgactttagttgattccagcaacattagccgataatgtttttgtggctctgccatgatatacaagttctgaaatctcgctgtcgtttccatggtaatatgtaaatgattttttgatggactaacctggtcatttgactggatttttttagttcggaggcttaaagactcccttagcatcatgctagccatctcaaaatatagctaagctaaaaagacatacttcaagaaagtagcgaaatctcctctagctggccaaatttagtcgtcctccctcgctagccagtagccactctttccaacagaaagaggggagaggttgagtggttgacatgcaggtcccacttagggcatccatgtggatttcatctggattatttgcactgagggatcgaggttatgatgctcatgttttcaagctatgggtcccaacttaattcccatatactcgtatatctcaaacattgtgaaaggtatcaccagtgaaactttaccgaaacaagtatgcctcaccttaataccttatgatcccattggactatataaatcggtaatgccctaggggcatgcgcaatggttattgccgaacgtgaatacgatagacaccataattctcttaaaaatttaagtagatctattttttttaaaaaaaaagttttaatttcgtagtaatatgtaattaatcatgcgctactgatcaccacgtttttccgagccatacagtctctagccaaactgcgcagtcgagtcagtcgagctagccctatacttaccgtgagcacgggtgcccatgctcgagagaacattttctgcccattacccacgacgcagacacgcagtgacgttcgggtgcgactgcggtggctagccagatagtaaagtttcgctcaaagtaatatcgtataatagaatcgtatcgtaatatcgagatactatgagatttttatttttaagtttaattaatatttatattaattatatatagccattctatataaaataaatatagtaatgatatatgtcatgcaaatagagatatttatcaagggaaaccacattggttttgatatattttactgatttttatataaatttgatcgtatttatttacattattttcaaaacacgttatttaaaataatattttatagtatcgtagggattgtagaatcggaataccacctaagatttcgtaggataatgtagtaatgaatagtagtatcgagatactatgaaaattaggatactatgtgggatcggtattgtttcgacttgtagaatcgtagtatcgtaagatactatgatataaattgggatactaacgaccttgcggctagcgacaacgattgcagcatatccaacctattctacgtccaaattcgttgtactagaatatgtcacgtcctagtacttgattggttttttttttgacatgacacaccccagtgcaataaatctaaacatagatttattataggatatatcacattctattactagattagctccgtaatacaataaatctggacatactctatccgaatttattatactagaatatgtcacattctactggattgactattttttttgggacatatcacatcctaatactaaattgactttttttggaacagggagcatgtcaaacaggtggagatctaaccgacggcgctaggcagcggctagcggcaattccgacttacgttagacaaggagtggtacctggtacaggaaaaaaaaatcacatcttccatgacaaattttaaaaggcgcgtgaattgggtgacaatttctgaaagactgatggcaaatactgaaatccctctgccaaatttgcttcagccatctcttgctcctacaaagcaaaatgagctcagcaggaattttctcatcctgtgaaccgagatttctcccaattagagtgaatctcatgcttctccgcccagcgcctgcaaatgaactacacactaaccatgcatcgcccaaacaaggccaacggccacaatttgcacgtcccggcagggagggcgtcttacagtgtaattttagacaatagacaaagtcataaactgaaccaaacatacatttaacagatactcaggggttcaaaatagatctaaaatatggtgactagagggtagcatccaaatccagccaatccgtatttccacttccacagcaaccagttgaaatttcggttgcaatttacctgccgatctagagcgctgagcctaactatatgaaagtccacatctttacagcaagcttccctggcaaatcacgggccactgatcaaagtttgctactctgctcagagaagagatgcacaaaaaatggccgcgtcgcttttgatttacacacgacacagccatgaagtagctgagatactagaaaggtttcgcctcgactgaaatgatacggtatcaatctcaacaggccaaaaagcttccagacgcatttccatctactgccgtccttcttcctcatcttcattgttttcatctgtttgtgatgccagcttcacaatgtcttccacacggatcttcccatctgtagcatattaaaaaagacagaggaccagttaggaaacagcacaaacaattgtgcatgcactatcatcagcagaacataaaaacatcagggaggacctttgtctttagagaggttgctgacaagctcttggacgccttcctttcctattgtatccttcagataagctgctgctgacgctacctcctcaggagtcaccttgccatcaagatccctgcaaacaaaatccacaagttgtttgtaacttccaagtgcaacctgatgtcctggtcaataactctttactacaaatcaagtaaacatcaagctcccacattatccaggagaagcatctgtgcaaacagaacttaatttcaaaacattttttgcttaatgaggggaatacgtctcatatattcattgtactgaggcacatgaatcggccaaattatcctacaactatgattttcacacagctataaacagttgaattggtttatctgagttgtaattcacttgtaagggcatggcggataaattataataacagatggtagtaagtattcgttctcataacagggaaaaaggtgacaataataattattttagcaagacaatattaatgaaaattcactagatgtggaacagcaaaacacactagttgactagcatgacacaaaaaaattcagtacacagcaagggacatacctatcaagaatttgccatcggtttccaatttgtgcatccacgtcatcaatctccttttctaatttctggagcatagcatcaacctaaaatacagaacgattgtcaacgactaaaccgcaaatcataaatattataggaccgtattgatcagcaatagtagtattggagaaacatctccagcatctaaggtgaagttcatacataagtcaatcaagaaagacgaaagtacataacatgtaacaagtcaatcatggcaataaaaaaaaccaagactagaaatttcagaatgagtgctggcatatcattcttgaatctgtatatctgaagtataacacagttgatgttagctatagtgttttgttctcaagctggcatatgaagggggaataaaattatgcagattccatctatagaggaaaacttatcaaaaaacaataaatcaaagtttcaagtgatcctctttttaggatttacacgaactccttatattttcaagcagagagatttacacgaactacttatattttaaaacagagatgaacctaatatgcatgttacctggaggggggagggggggggggcatttcagtcaccgtggtaaactatgaatttgcatgcaggatgaaaagtatcagtaccttctcaatcagcgccgatgagaccttttcttcttcatcaacctcagcagccttgtccgactcttctctagcagccatgtaagctttcttagcttcctcttcaccttctgtaccctccttttcaagcatagagttatacagttcaatctgcattcaacaaagaccaagagttattgaaccctcccaagtatttgcaacaaaaatggaagataactgcatgaacaattgtcactctaatatcactttacaagttcatatgatacctctttgttgacaaggctgaggaactcttgacgctccttgctaacagactgcaatataaggaagtcagaaaaatggcctgttgaatgctcataattacagtaaaagaaatgcataattattttctatcatataaaaacagtagtggttcaatagaattataaggatactaaagtcagtgtatagttaccaaaagaaagtatggactaactaggatcataccgatgcggatgccagtacagccagtgctcgactaaaattacagagcttttccttatcgtgctgttttgcttctctcagttcttcttcttccctagcagtaggaccagtcatttccttcaaagccaaatcttcttcagcagcctttggttctttgagtttggccttttcttctttctcttgtttcgctttttcttctttctctttcttcttctcttcctcctgaatattttcatatcaaaagcattaacaattcaatgttagcaatattatcctgaagatagaacaattgggctacagttcaacctagggattttagaagtatcacgcagaacataaaataattgggatactgtttagtcctacttctagcagtattttgctgaaatgaaagtaatttgtttcagaaaaaggaaaaagcatgttccttccacaatattaaactaaagttgacacatcagatttcatcaacagacttatgttcttctcaagctaagtgtaaatacagcatattatagttcttacatccaatggattagctgataaacagaaacttaacagtctaaatttgagtaaaatttgtaatgactcctccaaacttcttaatatgggcacataaacagaaacttaacagtctaactttggcacgtgtgaaaacacacgtcacacaagaatcagttaatgcatcacaatttagatgcactatcgtatatgtgttgttttctccaattactcttttttcagtcattcttttttttgttcttcacaaggaaaagtttgaatagtataaaccatgtactgtttctgatatatgcattaccaagaggatatggaagatcctatgaggttcaagcatgaaacctagcaagggcacaacagaacatgcaatactaaatactaatacgcctaacattcacacaaatcagaatctgagaatgcagagtgcagatgatccatcagttgtcctataaatggatgtgtttctgaactaggtcaaatacaatttaatataaattaagatatggtacataaagattaaacacaggaagcatttttaacagagggcagttctgcatcggctgatatttgtacaatcaaagtgatttactgatttcataaatgccccaagaataactgtttaatttgcacaagcagaagtgaaatatcttatgtacataaagaaaggaccatattatgtatacatcaccttgataagttcttcctgcatctcaaggaattccagttttctcctcctctcagaaaccgaatcttcagatggcaatacggtcccaactgtatccacaacttcatctggtagagaagataaggttgctacaacagcctcctcaggcttcattttcccagatacggtaaaagctctaacatcaccagatatgagttagaatcaagcacgaacaaatcaaacagcagtatcatagcaaacgagaaatatgtgatatcaatcaatgttaccttgaaagtatgagaagagaggatggcacagcatgattaagtgagagatccaaccaatctcggagctggacaggaagcaaaattactagcttagaaaaatattcagttacaagatagcagttagttttttgtaacacacaacagtatggttaaaagctatgtgatcaagttttttatgtgctcaattcaaggtggaaatgcagaagctaagtgctagttacaactttccttcatctgcctatcagacctaacagaacattacccaagaagaaataatctaatgagatcatatgtctcaaactaataagtaataaactaaagaatgagaaagtaacaactaggacaaataattttgcacagaacaaacatatattcttttgtagaacaaaactataagcccggcatggaaattgatggatggctctaatctatggaaacacaaaaatgagtatgccgcatcactagtcattcttgacacaagaatcaaaggtgtgttaaaatgaccgaagttaagcctagacatgtgcatgagatatcattatcacggatatgttgtttggactaaatggacagtggatggaaaaaggtgtgaactaattcgtcccaaaaaggaagaatggcatataatgtgagaaaggaatgaatgccaagagtgacgtataggcagcgagagtaacaaataattccagcaagtaaaagagtgaataaattgtgtggatatgcatatagcggaaacaatgcaaaaccaacctgttggcgcatttcttctgttgacagcaaacctaggtgaccacgttcacgacaggcttgccgaagttcctcttcagagagagactcaacaccctcagcttgaatcatcttatcgtcattcttaatgctacatatagaagaatataattacaaaccaaaaataaataaactcggtcccaaggggaaagacctcccccagggcatttcaatacacctgaaaccgggggctggggaaggccacgaaagccagtccccccccccaacccccaaccaaaaaaaaaaaaaactcggggagacgccccctatggatcaggaaggtgggccctcactacaaacaataaccagatatttcgccctactattatggaaaatgcaaacggcagcaaagtaaatagcaaaacaactagtgcattgaataataagatactgttaaaatatcttatctgtacagcaaataatcatagttgttaaacctgagaaactgttcgagtcaaatgtatgccacagccacttagggtacatagatcttgaaaaatacaaacaaatacaaattctggtgtttactaagtttcagttgcatatccagcaaaaaaattactgtttattttctttgcatatgaattaggtgccgtagacttttgcttgaaatcactcctttgttttacaatttgcaggccacccacctctgttcttatattatgcaattatgataagagactacaagattgcaaaaatcactcagtatgccatttgatggttgtcttctaagctttatgagagaaagtactaagcaataagctatccccaggtatccatcactcgctgtatttcaaaattgaccattccaaacttccagtcatatttatgtcaaacagatttaagacaccaaatatgcaaatctaattggcactccagttgttaagttaaatattttcatacatgtcatataatcttctcgacgcaagtacttactcttgcagttttttgcgaagcatgaacctcaagtagtggtcagtaccgaaaggtcgaatacccatatatttgcacatgtttaccaagcgtggtctgcagaaaaattgaaaaaagaaatatcaatcagcaatcagctctagtgtaatgtgatgatgaacttacaagtatattaagaatggtaacctgctcatgttatccaaagtcagctcatcattaaacagcttcgcgaagttcaagatttcatcatttgagacatgttcacctctcctaacctaattaccatttaaagtgagttattcgacaaacaaattcagaaaatcgtctaaccttctagtgacaaacaacgcatgtatagaacttataccttgttcaaaaattcatcaagatcttcggctgtttgttttatttctccactacgtgatgtttgaacttcctttgccatttcttttgcagtatcttgcaaaaacttggcatactccattcttgctttcagtttccttttcaacgcttcctgcacagatgagtgaactacattcttaaaccaatcgatttgcactgcaatagtttttgtggttccagtataggtggtacaaggggacaccaaattaaactcgagatgcaaaaatctctcattagcaaacatggaagatgcatacaacctcctattgacttgttaccataatgatagtacacatgcattagtaaagtatcagtaagacaacaccaagtagagaaaatcaaacgcctaaacaatattgatcacattagcatattatgtaactcaagttgttacactgacatacctcttctttcatcttgtcttggaaagttgagggaagcatatttggaaataacttgaggaacactggaagtaagaactccatgaatggaacaatgatgaacacagcaaaaggtaccagcctgaagatatctgctgttgtacgggtcagttgttgtctctctcttcttgaaaggttctttccaccagcaagtttcaccagtaatcttgacgaaatcctcacatctgcccagagtagctttgtccctaaccagtaatgctgcagcgttgacacaaattcatccttccagtgcttcagctttgcagcccaatcagctctgaacacataaaaagaaacaaatgttaataaaagaaagggaaaggggaaattaatattcttgtcttaaaattatgggctggagggcaaagagaaggaagtgagacctgctcatcgaagcaacagctcggagagcaggaccaatacccagaagcctcgcccagaattttcgtacaattgattggccagcctttacagattcttgtacctgcttagctttggctttagcttttgcactgcttaggccttccacagcctgatcacattcttctggggatgcctcctttttccttttgttctgtttctgatcctcactctgttcatcttcaatatccaacttaggttgcccagctgttgcagttgaggctgtgcggactgactgcagcaaatgtctagcacccataggcaacccaaattccttccttccaattccataagcaggtagagaaatcccatgggctgggcgccgcagaagcccattaccaagggctagtagatctccctttatcaatttcacaccatactgcccttgctcccatttggaatccccagagctttgctcaagaaatcgctgtccgattcttgattcatcctcagaaccagatcttccatgttggaaggtagagaagggggacaatgagagggtaggtgcgttaacatgatccaaaagatacttccttcttctgatgaccgcccttgaagccatacttaattgcttcacacctttccaattagaaggccaaggtcatgcctttttcggacaaagaccctgaaataatccaattcaagcataaacgtgtggattatccacaaagggaaaaaagaaagaagcagcacatatgagtgaacaatattcattccaagaattctagcttaatgtttaaacaaattttgctactttcccccaaaggccctacatttgctggtttcaacgatgaaataaggattatccagagttcccacaatactgcacgtggtgtgttgaagtgggagtttaaatcaacaagatagctatcaccagaaattcacttcaagcatccaagggcatctcagcacaacactaacatcggtagaagtttgctagaatctaacaaatgtaaagaatggaataggaatcaattcattgaacctaacagataagaaaattactatcgcgagctggaactagggaaccagctactcccatgttgctagagtacagatacagggaacccaagtaacacagtaaattaaagtccactcatttcacaattcctgtgaaggcaaataatcgagggaaagatacagttctggtagctacagagaaccaacaacccagagacaatccaaacacacggcacttaggatctaccagtgtagcgctacaacatcatggaaaaaaataaaaagaacttttaggaaaaacactaattcgtttgcattgatcaacactgacaaatcaatcctaagatgaccacagccaaatcacccaaaagaaaaacaaaaagaacgcgacaccgatgagcaaagagcgagctcacccacccggctcccgatccactccacccaacgacctactcgcggctcaaacgcgaatcccccagcagagaaacccaggggaaagaaatcaaagaaaaacacgcccagggatcgtctcgaggtaaagcgggggtggagagtgaatcggctcaccgccgggcgagaggcgcgccgccgagcccgtcgagctgcttggatcgaggaggggttagggttttggagagaggaggaggagagagagaagaggagggacgagagagaagagcagccgctgggtatttggaggggagaaggggagacaagccgtgagaagaaagaaagaaaaaagtgcagcggccgagagaagagaaaaaattgcgagaaaatagggagagggggaaataaagttttcgcggcgcggcagcgaatgacatgtggggactgtctaagatgcagatttaacatttttttctaaaattgttgaagtttattacatccgttaactttctttgttcacatgtttcagaaaaaactttctttgtcacatgtttaaccatttatcttattaaaaaaatttaattataatttattttgttataagttaatttatcacttaaattagtttaagtacgatttatatattatacatttacataaaatttatgaataaaataaatggtcaaatatgtgtttaaaagttaatggcatcatctattaaaaaagaataaattatttatatatatatatatatagcttgtcttaaaatattggataaatcaaatttttatgtttggaataattaaaactttattaattatgtggtatttttttctcattttacatatccatatttagttatctctgtcgaaggagaagccaattctaatgcggagaaaagaatcggcatgtttctatcgtttgtctttcagcttataagcagctatcaaattttgaatttaaatatttaattttagagttggtatattagagtttgttattgcagtttattttttattattggtttttaaatcgctaagtacacatgtataaaagttttgcccgtaatttatttttctaataagccgttttatatcctatcaaaggtatcagaatctgctagggtaggcgcgtactccttccagcaactcggtcacaatattttgctcagcttgtgacctgcaacttggaattacagtataagttttgaaaattaaaataactgtagaacttggaatttgttacggtcttactatttttcccccggttttatgctctgtattttgtatttgatgaggtgccaatacgagcagcctatttggtggagtatatgcttccgctaccttttcttttttagcacacgttattgatagtactccctccgtctctaatataaaagattacttgcactgtttaagcactcgtcttatttaaaattttttaaaattattatttattttatttataacttactttattatccagagtactttaagcacaactttttattttttttccatatttttttaaataagagaagtggtcaaacaatacgactcctaagtaaaatgtcaaaatccattatatgaggagcagatgataactcctaaggtatattcctcatgtacttcattatctgcttgccctcctgcaatggagctcatggatccattatatgaggagttgatgataactcctaaggtatattcctcatgtacttcattatctgcttgccctcctgcaatggagctcatggatatatctagttttttttttccgctgcagagttacatggtaatgtcctcttaacaaagaggttgattagacttccttttcaaactttttacgatgttatagctcacgaaatttgtgtggaagtttcaacaaatataaaatgtaattgatcggcaaggggggctttggggaaatgcttgcgagcagcgttgaacgttcagaaaattaacacattattccagttaaaaatgatataattcataagaaagtaaaagcgggctgattatagttacaaatattttttggaaatacaaaaacgtgaaaaatgaccactatctcctcgacaactcgatacaattttcaccgtgtttactcacatatgcaaaaagggcggaaatcttgacggcaaccaggctatctctctgaagcttgtttcctgtatcaggtgaaaacgtgagaaccaggcagattctgatggtagaacaatcaggggaaataaaaaaagttcaaaatagtttggagatgaactaaagtttgagagctcggagagctgtataccatggtaacttaaaagtgtctctccaccgagtctgcttagtaaaactcgtggatatcttgttcaggcgtacgattatctcttcgaacgtcggcctgaccgaaggtgttggatcccagcactcctgtataagcctgcatgcaacgaaccaccgtgagaggcaaatggcatgaagacaaaatgaaacataggcggttttgcattgaaaagaacaccgtgcttgatgatgttttaggtgctaaagtctaaacctccacagtacagccgagctgctaagaaaaaaaggtgaaggaagcagcttttgcaaagcgacatcgtttgccttttggcttatcgaacggaaccagaattttgatttttataacctaattttaagttgattttaagattttttatcatatttatattggcttttaaatcgctaagagaacatatataaaagctttacccataaattaatttttggattgataataagccgtaaaacgacttatcagcggagtataaaccaaacgattaaactcggttgcgaattttgattgagcagaaacaaagctcattgcgagaccaccaaggtaataatacagtgcatagaaactacttctagttactagttgaaaagcttatagtaaagattcactcactctctcaaatcatcaggatagtatttgggtttgttcttgaacggtggtctcataccctccaaacaaatcattttcgccgcctcctccggtggttttgggtggaaagcatgagttccttcaatcatctgaatcataaaagtccatgcagaaaatgccattttaaaaagatgccagttcaagtaaatatcggagtcaaatcaaaccaccactgtggatttttttttcttctctttcaatacattcaactgtgacaactctttagcatataggagtacaaattgattctgttgcgtgtaagatgaatgcttttacatacctcataaagaatgagaccaaatgcaaatacatctacacttctgtcaaacgttccatttctgtacatctcaggagcggtgtatacacctaggcaaaatacggtatgaagattgttgagtacaagatagaacaccaagtgttcaagtgactcttttgcacataatagaagataaaatacaaaacatgcacacagcccatagtaaaccgattctattacaggccatggaaagttagttaaaatgatacaaaacaatacagggagaaaaacattcataagtcttaacttcacgtaaagaacagatgcagctgcaacggggccaataaaattgactaaaggactgtagctctttggagcaaaggccgggatgttactcattccattatctaaaaaaaagaatatgttccgtctaaaggattaacatcataaataacttataaccatttaaccaggttttaaagtacatttaatcggttataagcttcatgcacgtataaagtgccccctttttttttccaaaatgcataaatgcatatatccatttcaacgatattccctaataagccgtttggcttattagtgaatatgggcaactgatgaggctctagaaaccacatgttattttaaagaagtatagaccaataagtaacacgattagtcactccccaatcaaatgtgcacttttgtacatcgcctaggaattttaagtagtacaatatattgccaatttgccatagtttctgacactagaatatgcccaatatgtatgaactgaagtcgatataaactgccaatgagcaatttcagggtgtagcatcaaaacaagagttcaacatactgttaaattttgatgtcgtctgatccatttgtggattatcttctgagactttaatcagactacgtgagccaaagcctgccactttaagtttcccttcatcatcccgcacaatgcttctgcaaccttaccaaaatatcataacatacagtgcacaagttgaaagacagtatggttcaaaacattgaaccaacccaatgataaaattaatttaattcagcttactttgttgacagattgccatggatgattggctctggcttgcactcgtggagataatttaatcccctaaatgagaaaaaacgaatgctctctcaatttgtagaaaaatataaaatcaggtttccaaagctagcagacatgagcttcattttactctattgaatatgtcttctgacatacctcgcaatgtcaagggaaaatctgatagctttgtaaggctgcaagcgaccttttgtttcaagataactggctaaatcaccctaatccgaaaaaaaaaacagatttagtcattgatgacaaaagaggcatactgttcaggtaagttcatagtactcttatcaagattatgtgaaaattgtccatagactgccaaccattgcaccaaggaaattatcaatttgaaggaatatgattaggaaataattatgtgtaaaaagacaatcgttgcctcctccagttgaatcaatcataacagcttaccttttgatgatactctgaaacaatcatcattggtacattttgtgtaacagctcccacaaattggaccaaatttggatggcgggccttctccagtaaagtaagctcgtgtttaaattcatttctgagttgatatagcaatgaaacttagagttagaagcacagcatgaaaaataaaaaaagaaaagcaaaaaacaccaagtagacagatctggaaaatagggaacctctatttatcatttaaaactattttagtttaggttacacactgaccatatgaaaataacatccattatgatatcaacaacaagcatcacttcaataacaataatataatttactcttagttttgtctgtgaaaacaaagattgttggtcaagtttagtgaacaaaaatagcatgacgtcactgagtaattggaattccacactgatatatccaacaaactgaaacaacaaatcactgcacttgtatggttataatagtctaaaaatgcttttatgtatatgcatcagtaataaaatccatgtgtaaaaatgtagtatgcatgaacggtatttttaatcacatgaagagaagatgtagatcatggactcatggtagtgaatagtcgactgcatgaggcataaataaggtacaatagtaaggagaattacggaggcagctaatacatgctattggcgtctgagaagctgtctttgtcaagtatcttaacaaacactttggatccataccacctggcaacatagtgaccctgtaaaaagttttatggcaagtaggatttgtcaagattctgtgaaagtcataagagaaaaaaagggcatgtgcatttgcatgaatgtgaagaagaaaagacatggaccataatttagaagatagaactcacaaaacaatcaactgatgaaaatactaagaaccatcactagattgagtttccatggggagtggagcacaatttattaatcattgtaagtccagatataaatcaggtgtcatacacaaacacatgccttttaagtatcataagccttagcacttaagtggaagttgataaataccaaacatatgaataaacaaattactggaaaaaaaacaggggaagttgagcgtgcctttgtaacttcctctcctcttctgaactcgagttcaagtgggttcagctcatactccggaacttctttgggatttgaaactgtcatcggggtcttcttttgtttctaagaagcaaaaaaagaaaaaaaaaacatgacactatatatgttctgtatatatgtatcaaagcaagtaagcaacaatcaattgcttcaggagtttaagtaggtgattatagtaccggagtttttgctcctcttgctctcagaaggttgtaaacttcaaagtgcccgtaatgcttcgcgtctgccgctggctgaacataagaacattgcacgcatcatttatgttcgatcagtcaatcgacttattcatggatagtgcgtacgtgccttacacttcgctagttgcagtcttgcagaaacaaaatgaatactcgattactagtaatgtttgatactttgatcacacagaacgaacactagaaaatgttcagtagtacatgaacagtcttcatccagattccagaacttagaacagagcaccatggatagcaatgcgaggagaggagagaagagaaaaggatggcgcagtaccgtgctgccccagcggtcgcgggcgttcatgttggccttccagctgagcagcaggcgcaccacctccccctgcccctcgcaggcggcgatgtgcatcgccgtgcgcccgtcgaggtcaatgctgtcgacgtccaccccgtccctgagcagctcctccaccccggccacgtccccctggcacgccgcgaacagcagccgcatcgtcgcgtccaggttctccggcacggccagcatcgccgccgcccccgacccatcctccgccgccccgcccccctcccgcggcgtcgggtcgagcgacgactgcctcgcgagcccgaacctcgtcggcctcgcccctccccctccccctccccctcctccacctcctccaccaccaccgcccaccgcccccgcccgccgcggagtgtacaccggctccagcgacagctgccgccacaccctcgccgcccccgacgacagctgccgcgatatgctcctcttcagcttcgccgccgcctccataccccgatggcgatcaccactcctccgaagaatcccgcggccgcagttgggatctcgcgccgtggggtggatgcttttggggattggagagtggggttccacgaaccgagcgtactactgctactactaccggaggacgattagtatacgcggaattccattagcactcgtaaatcgtactactactaatcatcaagcgtccttgtcagtggaatggaactagaacagtgggaagcatatgatgagagaaggggagaatacatcccattaattaataaaatcttccgtgcaggtgagaggtagagggtgggaaataaccgccgggatattgtttattccggtgtgggggaaaaggcgcgcgcgtggttggtgttttttaaaattaaaattattactggttgggtttgggggttggggcgataggtgtcactgacgggtggggccgtctctcttgtgggtgtcctgtcagtggggagtgggtggatttggtggtgtttatttggtttctgtcggttcgtgagaacacttgccgacgactattcagtttttttgtttttgtgttttggtttggagttgaattattgttgcgtagctggagaaccggaaggatggtgggctactgggctgtgtgatgacttgtctgttgaaattttcaacactttgtcgtgcaagactagactgattcctataaaaaaataataaaactgtaccggtttataatatatagcttgacaatttgacctttttttaattacttgctctagtgaacaaaagagactgttctgaaattatcaatccgttatccgcacttttctattttttagaaaaaagacacggtacaaacgtagacacttacaacgtgcacacaccgtattaaattgatgtagtacttagctatcccttcacgattcaggagaacattctgtgtagggaaaaaaaggttagagatgacattgatggcctcattttctttcgcggaatctcctaaaaggagaacagttgcgcagcacgtataatggcttctggtgtccaatcctggtttgctttatttaggggatcttttagtttccggcgcctcaatggcaacagtgtcctgccccgtgtttggaatggcgattgcatcgagtacgttcgtgcttaatccggtcggttgagattttgagatgacacattctttttttgtggcatctcaccaataccggatagcgtatgagctatcgaaaatatcccgtcccctgctggattcggattatcatatcgcatccatgaaagctccaccaaacgacaaagcttgatggaggaataaatagcataatttcgttcagaattttcttttactgtttgatcgatacgctgcccctacttgcagcccgacaggtgggccccgtggtgggtgacacagtttgttccctttggtagttagcttcttcttgctttcctctagctcaggataatggagagaaattattagccgccaatgacatgccactccagcacatgtggttaggaaatactctcacattttttaatatatagtgtcgttaatcttttaagttatgtttgttcgttcgtttcataaaagaattatgtaattattatttactttattgtaacttgttttgtcgtcaattgttctttaaacatgaaaaaaattctttacatttgcaaaaaaataaataagatgaataaccaaacgtctattaaaaaatcaacagcgcatatattaaaaaacaaagatactctctccgtctcataatataacaatcttaaatcggatgtaacatagtataatgaatatagttttgagggtgtaatccaataacaactggtggtactcccgtctgtttatatttgttgcactattttatttcatccgttttatattataagccattttactttttaatacaaactttttcaataaaaacaaatatattatcaaaatatatttaacttttaatttaatgaaactaatttgatgctgtagacattgctttttttactataaatttgatcaaatctaaagaattttgattaataaaagaatcggacaacttataatatgaaatagaaaaaatatgtcatatttggtttaaggttgctatattataagatagggggagtgtaataagcacgacttccacctccggagcaagggacgcggggctatgggcctgtttggcacagctctagctcgaactctatctcttttggagctggagctcagccaaacagttttagctccaacaaaactaggagtagagttgggtggagctctccataccaaacaggccctatgttggcagcgtgcgagcgagagcgtcgctgtcgtcgatggcgatggtgagtcgcagtgcgcttgcttgcccggcgcgacgggcgggtttcgcgcgcgactggaaagcgctagctactcgatcagatcgcacgatcctctcttctcgctgtcgctgtcgctgtcgacgcgacacgatagtaaatgtactagtactagtattatatcgtttcgttttgccctcgcgtggtggaagatcagcatgcagcatgaatgggagaaccgccctggtgtttccctcattttgacaagtgcaccggtggccagtgcattgatcaagtgcgcttcgtacgatcgagatggcgacttcgcgagcggtggatgatgatgcgcgtacacatgcatgcgcggccttgcacgacaaatggcccgcccacccaacgttcgccactataccgctctggcccgaacgggcaaatatgatggactacacgtgcgccacgttaccgttgcaggcaatcaatacctttccggcccagttaggcagatataatgggcctcgtacgtcgcgatattgtttcgacccaaatgcaaggggctacaatgggcctcaagtatgtcgcgataacgtttcgttccaaatacaatgggctgaatgtccgttgcaatcgctcgtgctcacccggggtcttttcccctctttcctccggaacgactcgattggttccgatcagatataagggtatacatgtgtgcgtgtttaatactactacatgtttcccgtgcattaagatataggtctccaatctaaattctaacgtgtgttagaaacacgcgtgtgggtgcgtgtgttgtgtgtgatgtgagcgtggtgtgtgtacgtatacgtcctaatttgcaacttaaaaaaagatccggtgatatctctattttctgtttttttagagtcgcgtggagggagctcttggcatatggtctcgggccatctctcggtttcatctaaaaaatggcgtgctacgatttacgagaggaatcgatgacaacagtactcacatgctccacgatctcatgcttaatttttttcctcacaaaatagtcgctaaacacacgagaaacgtgacagctcccacgcacgtaaacaaaaacaaaatcgtcccaaccacttggatggagtaaagcaaacgccgcctcattgcaccacgtaacgaatcgattgacgtgcgcgcccaagaaaaacaaaactacaaaaagcaactccgaaacacgtggcatcatcttttggccgtaccgctggcacctggcatcatcacatgtatatatcgacccttcgcacatgcgtgatactacactttcacctacaaacccgagcggctcggtgacacgtacacggtacaccctccaaacccttaagaaaagaaaacctcgcaaattcagccatttcgacgcatcatcatgagttggatgggttgggtctttttatttttcgaagataaccatgttgacccatagagagcgtagacacggagccgaattgccgaaagcctccaaagcaaaagcaggcagctgtgggagccgcagccgccggggccgtcgacgtcagaccaagataccgaatatcggtcggtcccccacgccgcccagccgctgccgctgcccggccaagtagtgccccaacgcgaacgcagggccacccgtgacccatcgcgagcggatcgcgccgcggccgcgcgcggcgggtggtgtcacgctcgcactcgcactcgcacacgccgcacacgccgtctccccccaaagccaagcggcgcgcggccgcgcgggggccagcccagtaattttccaccagccgccttcgcccctccactccgcataaaccctactagtgctaccatggcttaacccaaaaactaaaccgagtgccccgtgcccactgtcacacaatacagaccagccccccgtcaccttcgagctcgagccaagccaaacgatgtccgtcgcctccccgcaccatctccgcccctcgccgctggcgccggcatgccgtgctggcggcgtccccgcgcgcgccgcggcggcgcaccggccatggtgcccgcgcgtccgccgggccgtcgccgcggcctcctccggcggcggcggcggcgaggcggtgacggcggtgagcgcggcggcggtgggggcgcccgcgagcgccgcgagggacacgtgagttatccaatgccgttctccgcctgaattcgttccgtgtggtgtgtttgttgcggttgcttgctcaactgattcaatcaatcggggtggattgtatttttcttttgtttggggggggggggggaagggaatgcagggtgcggcgccacacgatctctgtgttcgtcggcgacgagagcgggatgataaaccggatcgccggggtgttcgccaggagagggtacaacatcgagtcgctcgccgtggggctcaacaaggacaaggccatgttcaccattgtcgtctccggcacggacagggtgctcaaccaagtcatcgagcagctcaacaagcttgtcaacgtcttgaatgtgagcccccttgctccaaaatttgttggggtcatgtgaatttgatgcttaaaccaatttagtttgccatttatagatctgataagcttccggccctcagtaagattctttgacagcgattggtgtcagcagagtgaagataccaatgttgaatattgttctataaagagcggaatttctacagtatcaactctgtttatattttataacgtgccttgctcttgagcatcttttgtagctagaaataccaagggcagaaaccttttatcctaatctggtcaaaacattagccctctttattgaaaatcttctaagagtaagaataaataactcttttccgtgagtatctcgctaactatattgaatgtcaaacttgcattttatcacgtacagacatattctggtcaatgtaatgtgctctatttctcttgtctgcacaatttatgcaataaagtccgggagcagaaaaattaaaattcaatgttttcatttgtaaccaaataaccaggttttctattataacctaagtattcctgagtatcttgggcttttcgttgagtacttgagttatagcacagtaaatgctactgtagcatctgataagtataaatatgtggatactgccatgtgaccttgtttaaaatagttgcattgcatttcaattattgaaaatgttcattgctttcccttatctatcacatagtctctctctcccgtgttcacacgaaacatcgcactaaccattcctcacctatgtacaaggtagttaagtctggaacgctggatagcatggtcattttaacctctctttctcttgattttatactctccttaattcttgtgccggctaaaaattgcaggtggaagatctatctaaggagccacaggttgaaagagagctgatgcttataaaaattaatgttgaaccagatcagcgtcctgaggtaacatgtgctgttgacttgctatttgcatagtgtaaaaactttgtgtagtgaattaagcaacaggcatgttggaactcactcgtactgcacaaaatcttgttatgattgtcaggtcatggttttagttgatattttccgagcgaaagttgttgatatttcggagaacacccttaccatcgaggtaaagactcctgattccaacaggtttacatacatatgattgtaggaattcctttgatgtgtatttgatcaagttgtaggtaactggagatcctggcaaaattgttgctgtgcaaaggaacctcagcaaatttgggataaaagaaatttgtagaacgggaaaagtattttcttgaccattttctatttgcatttatcatgcatgcatacatgtgttattcacagtgctgactcttttttccccctcagattgctttgagacgtgaaaaaattggagcaactgcccgcttctggggattttctgctgcttcttacccagatctcatagaggcattgcccaaaaattctcttcttacttctgtaaataagacagtcaatggaagttttgatcaaccatccaatgctggggtatgtttcttgtactttaaatagaaaaaaaatctcatgagtccttcatctagttctattttatttttacataatttgaataattagctggttatgttgagagtgcattttactcggtacgaaaacaaatgcagttgaacctagatgttagccagtattggttccagaacaatgtaatgctataagcgataataacttagtgcataaacacaattagtatgctataaaggtgccatatctctgaacttattccatatttctatttaaatatttaccttcagtcctgtgaggtgagttcactgaagacaacatattctttggtggtgaaaagcacactgtggagtagaattacaggtggcgttcatgttggggttactgaaatgcatattcactagtaccttatgtcattggatgagacctgatgatacataagcaggcacccccacactaacgttgttcaacttttggtatagcatctgtgcattagtcatagcataagttatatgctaatatatttgatggccagaaatgagtaacataacaagtcgtatatgcctgtctattgcaatatgttactgattcctgtaacatttagtcacttttactatttaattgttcagggcgatgtctatcctgtggaaccttatgagggttcatccatgaaccaagtacttgatgctcactggggcgtccttgatgatgaagatgtaagtttcaatattatcagtttagataaaagcattattcagtcagtgttaagttccatatgaaccttggcaactatatccaaactttatttgagacaaaaaaaactatgtctaacttatgttgtatgtattcaaaaccgaatctagttccaatgtgactacactgagttcacattttccatcttcacaatcagcaaccagtcatatatatatatatatatatatatatatatatatatatatatatatatatatatatatatatatatatatatatatatatataaatgtctctgtagctctaagctgttcagtgttaaatatacatgttaatgtatacaaaattaaggatgcaggtcctaagctaaatatgattttatttggtgcagtcaagtggacttcgatcacatactctatccatccttgtcaatgattgccctggtgttctcaacattgttacaggggtctttgctcgcagaggctacaatatacaggttttctttttttcgaatagttattacctcgccgtcatgcctgattagttgttaacaagaccatactactggtcagagtcttgctgtaggcccagctgaaaagtcaggcctttcgcgtattacaacagttgctcctggaacagatgaatccattgagaagttagttcagcagcttaacaaacttgttgatgtgcatgaggtaaatcatatgcagttttcaagagcagtcaattgtggtagtaaagtcgcattaattcaaaaaatatgatttgtgcaggttcaagatataactcacttgccttttgctgaaagagaacttatgcttatcaaggtttctgtgaacactgctgctcggagagacatactagatattgctgaaatcttccgggcaaaatctgttgatgtttctgatcacactgttacgttacaggtaattttaattttatggctaatgttgcttgtgattgttaaacttttctttattagcttaatcagcttcatttacgaagaacaccgatctatgtacaaataacaaagtgccagcatataattttacccgcagcattgttataggaattctagtgttttgtcctaataagttgtgttgtgctttactgtttagcagcacagagcctgcagaaacactgaatgtttagctgaaccacaactgtcatttactcatttaatgcccattcaaattattgtgggacttctgcatacttgataacttgccgcgattgtgcagcttactggggatctcgacaagatggttgcattacaaaggctgttggagccttatggcatctgtgaggtatattgaattctttttgtacttttctttcacctcatccgtttgttgctcatgtggttatgtgatgtgaaatgatgtcaacagattatctgcgcaaatactgttaccgtattaacacacattgtctcaaaaactcattctccacacgtaatggatacttttgccgaagtgaacacatgcttttgactaccaaaataattttaaatcatttgccaacatctgctttatgtctttaaatatgatatgctaggttgctagccgtctcctttctatctgggacaatggatccgtatgctttcgcacccatgctcgcggcgtttactttcctcactattttttagataatggatagaaatccgatctctatatccacatgtaatatacccagctttcctcgctaatgcatattccgtccatgaccacaggtcgccagaacagggcgagtggcgctggtccgcgaatccggtgtcgattccaagtaccttcgtggctactcctttccgttgtaatcccaggtcttgtgagaagaaaggacagtaataaaatgcttggtcggttggttgctacctgttacagcagagtgttgtagtagagtgttgtagtcagattccgttcgttcagttatgttgtttgttatgatgctgttcttttgttgttgtttaccttcctctctgtaatgtgccaatccgctggcttcttgtccagtaaagatcatgatgcaagagttgagcctatgttttctactgacaggcaaaccaaacgtgcactcagccacttaccatgttctggaataaaaattgaatccagcgctttgcaccgtgtaaaatgttcgtaatataccatagaaaaatgttttaaaaatcatattaatttattttacaggtttttttaaactaatactccacctaattaatcatgctctaatgggccgatagccttgtgtactactgggcctgcaggtccaacaaggctgtcggcccagtggcccacggcgatgagatgggaagcggggaatagggagaagggaagaagaatccggattctgttgcggtggttgttggaagtttggagctctcgggtcgggatcgatcgattgatcggagaggaaggggaagaactccggagggggaggaggaggaggagcaccgatgacgcgggggaagcagaagatcgatgcgcagcggcggaacgcggagaagaaccagaagtcgaaggggtcccagctcgaggcccgcgccgtcggcctcaaggtcatctgccccatctgcaaggtgacgaatgaatccgtctcctcttcccttcctgcttgctaatccaaccagtagcttgtagcctgccgtattcggtattccctccccagccctaaggctagaccgctagattggatggattcatggaggattcgaggggatggctggatctttagcttcttgttatcgtctcatccacgatccacccagccctatgctcctatcccatgcgatctgaaaatctcgagccgagtgatcgattttgtccgtcttcgtctatagtccccggatgcaccccaattacggggtaaggagagacagggagttgatgtggaaatttcataggggataattttctattattgtaattgttctaacttcgtctctctaagcactgcatctagcctgcctgccaagggtggaactagtatgattacattaccctagtgatgttcttttgggagatattgctgctgttatattgtttgtccattaccatttctatgataatcaccgatcaagggcggatccagaaacaaaaagttggggggactcaaatactgagtacaccgatataaacacataatctcagtattaaactatgctaaaatgctattatgagacctttagcacctcctatcttatcaactatattcccctgcacccacgttggatccgcccctgcctctgatgaatactgtgttatggttgaacaatcaggaagggttggggaatatagttctaggcaaaatttgtagttggatcaatcatttattctcagttttggttatattatactgatgagtgtgtagtcgagaggtaggtccaaagatgagcatctttaaaggagaaaattgcatctcagtgtctgtactgcaagtttttggttggtgcctattagtaccacattttttcccctttgggaaaatatcacactgctcatatcttccatctgaactatttatgttaagttctgctaattgttaatgttgttgttgtgaatagtataaataccattataaagccttctctccagtgagttctgattccaactgatgaagcagcccccttctgtcctccaccactggttggagtaacagtgaaggcatcatcctacatctttttttatcattggacaatgctgttcccaatttgataaacggtatagatggaagattttagcagtcatattatttctttaaggtgaaaaaaattgtagtattatttggtaccaagcgaaaacgtgtggtataaatacatttttccgtaactgaattagaatctattactggtcactgcttgatctgacctacaccatgttgactcatttttgcatgcgcacgcacatgtggatgtggtatcaacttaatgaaacatcgcttttctttgtgtaggttcaactggccaatgagaaacaattgattgatcactatggatcaaagcatcccaaggaaaaaccccctagcccatcagaataatttgtgttggccctgatgcagaaacataagttctgcttgctctgtccgcgagattgttcgatctgccccatacttggacctcaactgaagttttactctacaatgtatgcatttcctcttgtttctggctagagccgtcataagcttgtgctttctatgagaagtatatcttttgatatcataatgccgaatcccgaatgtatatcccaactgcatgtggtacattatcggataagagggtgttgaattgtcaataaagcttatgaaaagtttgacaaaaaatgagcatatatctgggcctcgaacagtcgaacctatggttctaagcctggtgctcctgtgtaatttcatcacgtagatccaaggaatataacagctgactagcatactcatttatccaaggaatataacagctgaagtgttcattcttcagtagtacattgtggcaataaactatcatgttacattgcataagacaataacaatccatgcgattaatataaccccaattctcatacattgtgtacaatccatcgtaatactactaaactcagaaaaaaaatacttccaactcaaagaaatgttcattcttcggtactacattggcctctactgatgcgggaacttgacgggtgcaggggacgcgaagcccttgtggtacagaagctcggccatgacgctgtacgcgcgctgcgtcaggtggacgccatcccagctgatccgctcctcgggcctcgcgcacaccgccgtcccgcccgcgccgcacatccgctccatctcgaagttgtacttgccgccgcccgcgccgcagcacgcgttggtcagcgccgtgccgtcgaaccccatctcgcgcgcgcgctccagcatccgcacgtacgcgccgaagtagtcggcgtacgcgaccgtggcctccgggtacgaccgcctcagctcccggatcccctgctgcagcagcacgttgtgcatctgcgcgaacaggttgagacccacgaggcacccgttcccgtcgtacgccgcgcgctccgtctcgtccaccgccgccaggtagctcggcgcgcaacccagcgggaagttgcccgggatcaccacccgcgtcgcgcccatctcgagcacctccctcgccgcgcccaccacggaccgcaccacctccgggacgagcaccaccgactccaccacgccggtcaccatgcgcccgacgtccgcggcgctgcgccctcccggccgcggccggttcgcggcgaaggcgtagttgtagtcgttcccgccgatctcgcccaccatcaccagcgagctcgccagcttgtcgcgcacctcggcgggcgacttggtggtggcgctcatgaagtccctgaaccactggagctggacgctcagggagctgttggtgtgcggcgcggcgacgccgatcctcgcgagggccgccgcgtcgagggcggtggcgccggtgacggcgaagttgacaccgtgggtgaagtcggcgcccttgtcgaggtacgggttgagcagcggcagcccgaggtccttggcgaggtagtcgatcatgaggtacccgtcggagcaccgccccgtggcgccgccgatggccgcgccgtagggaggcgccacggtgtgctccatcatggcgccggcggccgctccttctcggaggtagttgccggtgtccgagatggagtccccgaagttgtagatggccgtgatgccgtccaccactcccgatgacgacgacgacgctgcctttcccggagccggccttgcctggcatgtgccgacgaggagcaccaccaagaacgcgacgaggagtggatgaaccctactcgccatggcgctctaggtgcaagtgcgcgctgtacgtacgtgttggctagcgatgcgacgcagctgttggtgtttgtggatagtccgtggcatcgcgcgcgtccctctatggctctatttatgccgtaggctgtccgatttcgatgtcgactcggagcatcggagcaggacatcaacagagtattcgaaaacggattcggaatcggagtgaagatccgatagcactccggaaaagttagcccagaacttcgagtaaaggggtgaacaatcttacatggaaatcaaattgcttatgtgcggaacgaacgatggccgttatgtacagcaggcagaattacatgatgagaattggaaaggcttcatggattttttttttcaagccatcctacgcagcttacaacaaaatgttggccaaatcccgagtacccaatactggtatccccatacaaatggagtatataatgtagcatatgctacagatcccatcttttcttcacacggaacaggaaggtgggattgcggaaattgtcctgaggaacttgaagcatgagctgaagtttcgtcttcattggtgcggtctttgccttgccgtcttcttgacccacctagcatccaagaaaacgaaactcacgaattgctcataaaagtacagtacacttgagccatcagaaggcaatattagcttcaatggacaaatcgtctaatgatgcaaagtcaggttttgcatgttttagccataaaaaccagcacttcaacaaaactgtcgtagtttaagaaattgtcaaaacagctgtcaaaggatccccccatgaaaggcataaagatacagtctacagtttacacaacattgcttatattaattattgatcattaaaaaaacatatatctgcaacactagcgcgcgcacagcaagcatagatggctaacaatggtacaaatggccataaaaaaagaactttggtatatgtgcattttcggggtttcagatttaataaatggaaagttttgtgtgtttaaacctttcgtctggacaagaaaaaacttcgagattttgatgagatcactaaaagaaccctattttgtattctctaattctcttgctccaatagtaatgtaagatatgcagatatagcaaaacaaggaggctgtaaatacatacccaaactgaagcccatccaactcgcacctcagaatcataaccagctttcactttgaaatctttaccaactgtgcgcttataaacagcattccagtcatcagtggtaaagtcataacgatagctgaaaaggggaacccaacattaaaaagacacattgggaaagaagctaactaccagatgtcaaagattatgcatgaagatgcaaaacccttttgcctccttgggcataactgaaaatatcctggtccaaattttaaattggccttatgcagtcgatacatcccaacaaccatattaaactgtaatgttaacacgaatataaaggaaattgagcaattgatcagccaatgaaaatttacaattattgatttaccaatgatgctaagcaatcaccatatccttcaacgctttgtgaagaaaaaaaaatgccagacagataactttgcagttgaagtatgtaaaactcatgaacaccattatcattcatgcagaatatcttgctaacacacaggaacttgtagatatgctcataaacatgcttggtggttgcaaaatcttgacatgacaaggttatccataaaatttatccgaaagccatgctcaagcaggacatcacataacgaaatcatgctacaacatgcggtacacaattgtaacaagtcagatttctaaatagtgcaagtattttcaactttaatgagataaaatatccgtacagatgtagtcattgaggtcaaaacacctccaatgtctgttattttcagttctgaaactttcttgatgttctcactaatgagtgtataattgtcaagaaaaatttgtggaaatttgcagcctacaaagcatgaatatgtggtggctaaaaatatcaaaccagagacaattagagacaaatgactaatagatcaataggcatggcaacaatcccaaatgctgacctcaacttatcagaaggaccaaaccgccttttgaagcctaaggatacagcattggaaggcagggacacgctgggaattaaagttagttcattgtcctgccatagagagcgtatgattgaagtcaaattaaacaaatagtctggaaaacaaaccaaagtgaaagattgtaaaaatcaccttataacaatatctcagattaatatcgttttcactgtactgggcagtaagaatgccatccaagaaattagattttgcaattccataaagggataacattttctcatccgcttcgtttctcctctcttcaactgacacttgaccaataggaaagtggagggttgctctcggctgcgtacaacaatcaggattttattctacatgtaacagggtttatatgccttatgctagtaaaaaaaaaaaactaaattagcatgaattctagttgccaaagatcatattcttctacaaaccctcaaaattgaaccttcaggatatatgatccattggatgcaggagaaatatacatagaagagcctaaacaacaatacctacaatatgaaacatgaaatgacttttgaaaagcggggcgactagtcagcattttttatagcatagagttctgcctgagggataaaagtgatctgtaagcccattcagaaccaatggctaaagtgcattatcatcacgatataaaaaattatatatatatatatatatatatatatatatatatatatatatatatatatagtaaatttgtttggtgctccatggtgcccgggcaccattgttgaaattgagtatatacctaattcaaatgagtatgaaactttttcaattacttagatattaacattagctactttactaactagttcaaagcaagtttgaactgaatttgaacttgtttttgttagattttgattctaggtatatagcatccatacatataattagttaggtatgtaatcatggattgtgaaataaagttaaatttgagttgttttgttgataggtataggtatgaatcgagttattataactaggtatatactcacaatttgaaaattttgaaaaatttgagtgattttgtgtatttgataccatggtgccccatatgagtgtcctatatatatatatatatatatatatatatatatatatatatatatatatatatatatatatatatatatatatatatatatatatatatatatatttgtaaggtatagcaccgactgcaaaactgatacgattatgaccactgaaccttgacagaacttttatcaaacaaacaaaccaaaaagatcaaatccatgaaacttggtactcaccagaccattgtaaggcaccaaggatgatagctcaagtttataagacggatcacccagcctagtgatcactgagacttctccttgtcgctcctgaaagtcaacaaaaagtcccattagaaagaaagaagtatttaggttccagtaccacagctacatgtgaaaagctgatcaattttaccgagaaactgtctaaatgaaaaattgagaacccctttctcgcgattagtaaattaacaaaatgcacacatactatatcataagcaacggaacagctgaacaacacttgatgggtaaatgcgggtgactaaggattcaagccagaaaaagaagaagtgtgccatttaccttgacatcgtgtgagccgcggagctggatggcgccgccggggagggagccctgcccgctgagcagcgcgttgcgggcctcgacgtcgtacagcacggagaaattcttggcgatgagcccgaccacgggcgcgacgaatagctgccgccgcgggtcgccctcctcccccaacccctgccccgacgggtcgctctggaacgacagccgcagcttggcgagcccgcccgcgaccttgcacgacaccttgtgcgcgaacatggcctcctcgctgtcgtactccgtggtcaccctcagccccggccgcctccaccgcggggacggcgacaccacctccagcgggggaggcggcggcggcggcggaggaggagggggcggcgggggcggtgggggcgggcagaggaaggtgaaggggcagcggaggctgcggagccatggcgggaggttgaaggggttagggttttgggaattggaggaggaggaggaggtggtggtggtggtggccatgggggtggcggcggaggaagcgatgcggaggggcggagggagtggtgtggtgggaagaatcgaatggaggaagagggaagtgggaatttttttgggggtggggtgcgggaggctctggaatccctggctcggggttttttccgtttacaaccctggactactgggttattctgttatgtatttctgtgtctgtatgtacagtgttctactactgcagtggtattattactcgactgaacagtaaatgtgactgtcagtctgttaagttcagtggggacccactcattactacatgcaggaaaggctgatggcttttttagccaatattttgaacttgaaagtagaatttgggtggttccaacttctaacagtgtgaagtttaaacagtgatcccttgtttggtcgtatgatttgtcaactctttggttgtgcaaagaccaaccacgtggactcttgtgtctaggcaaaatcacttgaggatgtgttcggctgtcctatttcaactacgatacagccatgttgtacagtaatttgtgtcattgcaagcagctgtgtgggtgcattgcagcagtcgaacacaccctgagattgtactcccatagtcccgtataaaacaaacttaggatacatcataatataatgaatctgaatagaatggatcacatcccgttctagatttgtatttttactagttagcaacattgaccttttctcgaaactttttaaatttttcttatggatagaaatcaaacttctactttttggatattttctttaaaaaaagcattttaatttgccataaagcatggaagttcaaacaactaaaaacacgtgttactttttttaaagctcatctttcaataattctagctttgcttgaaacttttttcaaccagaactacaatatcggttatttttcacccttgatttttaaaaccaaggagaagcattgacggtgattttggttaaggtgtagtatgcatgactccacctattagagtttaaatcataggaaacataaatgttactccctccgtccgattcgtagcgctagaaaatattccatccgattctaagttcttatattttagaacagatgaagtgtgcatatagggttgcgcttttgatactcctttgtttcaggttataagatgttttgactttggtcaaagtcaaactacttcaaatttaactaaatttatagacaaatataataatatttatattatcaaattagttttattaaattaataattaaatatatttttataataaatttatttttggtccaaaatattactatttttctataaatttggtcaaatttaaaacagtttgacatcttataacgtgaaacggagagagtaggttttcagtgaggctatttttttagaaaataggacaaacgtggcctctacgtccgatcggatgtacacagccaattttaggctatggatgtgttgttgatctttgtctgtgttaaggtggtgcattcaaggatatctaagtaaggtagtggtgtgcgcgcgcgtatatgcgtcttctaagtagttgtaaaaacaaaaactaaacaaaaaggatacctttggacatatattttttactccgttttgttcgtaagtaatcttggacaaaagaacaccttgaattggccgatgtacgagcctgctcttggccaaagcgtgtaaattatgagaggtttatggtattgaccacacatgtatcaatttacattggaagctccgttcacataatccttttcagggtgaaaatgtattgtcgatgaaacaaaaaatgaacacaatgtgccgctgtgctccttgctttgtctcgatcagtctccggggttgtgaacttgtgataccacagcgttattattggccgagggaaagatttaccatgtactaaaacatatccagggcatcgaacgtactcttgctctacaaaaatcttgtgtggaagatcgccatttctactgatgacctggaactgatcgtcataccaggtactactagtactcatttttcctgcaatcagacacgcataaacacggaattgctgacgatcagcaacatcaacagccgctgttccttgcaaacctgtcgtaattaagcacacggagacggcgatttgcagcgtcgtcttcagagacacacactgcaagtctgcaatgcaaattcagaactactcctaaccagcaagacgtagctagttaacgacagagccacgcaaagagaacgcgaccgcctttgcttcttcttaaggcggagagggaaaaagaaaaacacgaatctgataacgagatcgaggtcaacgggagcagagatcgaagaagcatacatgacaaaaaggaactcctattgcagccgcacctcaaatgaaccagagaatcgacgaaaccatgcatgcgtctcacgaacttgtttgctgatggtcatctaaccacgcgtgcccaagagccaataagccgactgctgcatcgtcaattattctccaatctccaggcatgcacgggtagctagatgaccagcaacaaaacaggttcatgggtagcaataatctcacctgcacaccacgaccacccctagtattctactagtagcaattagcaagcccagagcataatctggatatattgtcaatgagaagaaactggagctggacgcctggaagactggaagatggggcgaatgagatgaagctgctagtgctgtattgaagcgaaggatatattttggatcgggtaggtgcgtgcacggaagggatgatggtacgttgatgccagcgaattagaggcatattcgcgaggaataaaccgtcccccgcagaagcacgacgacatggaagcatcaagtaattaagcaggagacagtcagcaacatgtatgtacgtgcacactctgtagtgacgctgacgctgtgccactggctgactgtactgcctcttctgctaggtggagatgatgagcgtagatttggatcaacggtcttggtaaattagccgtgacagggaggagttgtaccagcggacgaacgcgtggattttgcggttgtccagtcatgaaaaaaaaaggaatactctctcttactcgtagagaaagtcattttggacagtgacacggtctctaaaatacaacttttacttattgtttctataaaaaaatatttattgaaagtattatatgtatacttttatgaaaatatttttcaagacaaatctatttatataatttttatattttcaaactcaacaatttgagagttatttatgatttatattttcaaggtctgacttaaacattgtcctaaacaattttctttacgagtacgaaggggtattatatatatccagatatactcctttcaaaaaaaaaatccagatatgagcgatgatggggcagcagaggaaggggactgttcggaacggatgaaacgctcgcaaagttgtggataatttgtaggcaaaattgttcccctctcggactgttctaccatgtgtacaaccatcctcggggcagcatcgtggacttgtggtgagagaggcctgcggcgctatcgacgagggccacgtacgactccacgtgaccggcccacggggggagtcctaggtctaccgacgcaatgggctgctacccccttgagatacaggcgagaggccgagagccagcccaacctgcatggcccgcgcgagtccctgacgtcccccgcggcgcgcggcgctggtgtgagtgtgtgacgccgtgacggtgtacgccgccgcaacggattccacccggcgcagcgcgctgcgcaaccagaccacgcgcgggcgccgcacgccagaggcccagagtgcagacgcccgcctgtgccgatgggtggagtggaacagaagaaccaaagctccgggaagtattttctacacgtgtcagtacctagatggtcctgtttggcacggctccagctctagctccatctctcctggagctgaagctcaaccaaacagtttcagttctatctaatatgggagcggagctgggtagagctctctcacaaaatgaactagagaggtggagctgggtttaggcagctccataactctactccagactcaactgctggagctaaatttaggaattggagctctaccaaacaggctctacatgcagtttataaataaacagttatataaaaaattataaattttaataagatagcttatgataatataagacactgtacaaacataaaagtctaaattcgatcaacaaaataacagaattttttttgtcgtacaagtattattcattaccgatgttaccaattattttttatatttttataactattcaagtcacgagcaaataacgggtgtcatgatagctgctgcagagaaccctgtcaaccgagctctgctcgtcagcccgtccgtcgtgctgctgcttttgctgctccctccatcctaaaaatacttaatctagaagaggatgtgatttgtccagatcgttattcagagtccatatcgtggttgagtttttttaagatgtagggagtacttggcaaggctagcaaagtgattcgctatatgtagttatgagctgatcattaattgattgcatgctgcttgcattaaaaagggcgatatgtgagcatttcttttccttcaatctacgtcaaggtcactgctcgtgctcggcatacgcctcggagagtggatcgtggttaaagcaggaatttagtatactaccatcacaaagtctaagcacatgattttcgccaagacgatatttgctatggggataagaatacgagaacaatacgcaaaatgacaatatataacgcagtaggagttcgttaacgtcaataggcgatgctgaatattttttaatgtccagtgaccagaatacagcggcgccccctgttttgccctggtttgccatggctgctagctgtcactgctcaaaagcagagcggcggcgacggcgaccaacaatttgtgaagcaatgccaagctaagtttctctatcatttaaccacgtactgtttcattagtctatggcactggccacctgcctcacaagtcacaaatttcaattttcaaacgactatgatacaggcaagttggctttgctagctaggcagtattaagatgccaaaccgccacatagctagcttacatacacgcaattaaggtcaaacattttgctctctactgcttccatagttccaaagacatctcaggaaccaacactgtttgctcaaggtgactgttcagtttcctatgtttgccgttccagttcttgtacatacaatgctttagatgtctcctagttcatgcatactcttctttctgcaatatgtaccagagatttatcagtttctttttttttctcgcaaaactgaactggagtagggaaaaaaccgaatctttaacatttgatcacatttttttttttgcagggctagctagctgctggtgatcacacagcatggcgaccaagtacatcatcggatcagtggctgcatccttcgcattcgcctatgtctgcgagatctacatcgcggaaggaaagcttcttggaggtgagctagcttaattatcttctctgaccaccgagatctccttagctaagctgcctagctagcttaagtacgtagcttgcagtttatgtgctctttctcttgtgttagtgtttattagtttgtgtttacttcagtttatttgtgttttatgacttgttgaggtgtgctcgtgattgagtgaattggtgtaataattgactgtaactcgttaagtaaaggccgatattctattccattatctaaacaaagtagcttgcaggtcatcagcatctgaccactgcttgcttgcacatgtgtttcttggcaaaactaggcacgacgactcggaccatggcgactgacgagtgggggaaggagacggacaagaagttccaggcgtggccgcggacggccgggccgccggtggtgatgaaccccgtcaggcgccagaacttcatcgtcaagtcgtctgaataaatcttcttcatcagccctccctagcattctctcggggaagaaagaaagccaatattgttgcgcgcgtgtgctgattaagcccgtgcacaattcacctcctgtttcagactttcagttaaagcaaactagcatgtatttttgctgtaatttttgtgttaattcccggtgagaaatcagctcgaaccgcacggttaaatgctatagcatcgcgacgatcctcgcagtttgtttctgataatatttagtgttcttcagggacgaaaatgatactccgtagaatagtaacctcgaacaatttgtagtatttatgttcgaaacagatttagaatttgttttgtttgaagttgcaaacataatattcagagagccgcatcaaaattccataaattaaattcagtatacccggcacactttgtcgttccttggtgcaatttgaaaacaaggggtttggagcatcggttgctataggcctatagccttgccggcgaaaataagatgactaattactcaatgatttgtactcaaatgatcgaccaggaattgaaggtagcaatgtagcattcatattgcaaaatctgtagtacattatattgaattgtttcttacaaagaatacatatagccagaagggctgcctatttccagttagtaaagtaggggagtgttaacctatattgaatctggaaataggaagaaaacctcatgtgcttaaaaaaaatataggcctcatttagaatgtaacttgcctacgtttctcttaacaccatgaatgtgtttttattggaaaagttatagtcgaggcaacttagaattaagcatcggagcatgtatttttatggtataagctttcagaaggtgttcttgcatacatgaaaagaagaaaaggaaagaaaaaacattgaactaattgtaagtgtagaagttgtgttgcattacctatttacctttactatgttgaaagtgtaacaaaatatgtgcatctaatatatgaatgtgtgaaacttgacactatcaatgaattctcaagtgttgaaatccaggagatttgtatggtagacctatcggatccaccaatcagatatactccatctaacacccataaatacaattgaaaatacacgtcaacattaatgcatgaaaaatcataaatgcaatgagtgtctaagatcctaccgtgcctctctctatataaactcctctaacatatacaatagagtccatatcgaagtaatattcttctaatatgtccaattgtccaccatgaatagaaggatgggttactcataggctgttgttttcatgtcttccaccttgccatctgctctctaagacgttaactttcactaaactgcaattttaactttttgtttattaacctttgtttgatatgtgttcaataatctatttcagttttggatcatttttcgaatttgacaaaattacatgctacaaagttgagttctactaagggaatatgtataagcttacatgcacatcctgtggtttccctcgctctccgtactactgcaggactaaaccaaatggttcatcacaatgttgttgtgaacgatacttcttcggtgatatcagaatgacattagaagcgatcaattggtggccttcttgcttggtcaatattgaaaaaaaaaatgatgttcaggattgaatgtaatagtctaatactattagattccatgaatgtgtacaacaatataataatcaataaattctcaaatcttgaaatctacaataaatgcaaatagggatatgtacaataaatctaaccatctaggaatcctccaaaaccatatactttgtgctatctaacacaattaatgcaactgcaaatatatatcaacatcaatgcagggaaaaacataaatacattgaatgcctaaggtctattgtgcctctatacaaactcctgcaaagctctaacatataaagtagataagattgtgttataaatcatctaatatggccatgagaaggatggggaacccattgactgctgttttcttggctgttatggtcatgtcctccaccctaccatcttgctatgcaggtactagggatatatgctctctaagactttttaactttcacatcactacactttaacttttcatgtattaatctttgtttcgatgtgtgttcaataatcaaatgttggctttgaatcatttcatcgtgaaacgtgaagccgatgaagggacgtgctacgatgtcatgttctgccggggtgatgtgtgcaagcttagatgcagataccttggttaccctgacaatgctccgtgctactgcaagagtaaaccggatggttcggcacaatgctgctgcgaacgatcatcactctgatatcggaatggaaccagtgattaatggtggctttcttgtttggtcaatgctatatatgattcatgattaatgtagaagccattgatccctacttgctcttgcatatgtaaattggcgatcgaacaagtattttcaggtctcatgcatactcaataaacttggatttgctatttgttactacttcactgaaatttctaaacatttgttttcatttggagaatttgtgattgattactactagttcctcgcttcatgctccttcaattgcaccaagaggatccgtagaacatatgaatagaataatctgtagaagcagaacaagagcttatctgtaattgtccatatgtgatacgtatatttcgattttattgttgattcgtcgacattgaatttggtttttcagacttgtgtaaatcgatgaatattctcttaaaaaaacacaagctggatgtatttggtgatgatgatttatcatttgagttgtacattatgttcaagcgtaaattgcgaggtttgtaactctgccatgtttaagaagattaagattaagattctgagaaaccagtttataagaatatagaaaatatttggaatagcttatgactgctgaagattctaaatagttagaactaagagtatctccaagagattatctatttagctctctaagttaaaatttagccaacatagaaaaaaaaggagctccaacaaactttccaaatagacaaattgctcctatgactagccaaatgtagccagccaaatgtagccagcctcttccggctggccaaagatgggtcccaccaccactcccagccccatccttcctctctctcctgtccacccaccactggtccataggagcgccatcggcgagcgaacgaggaaagcacgaggcggcggcggcggcggggacgaaccgagggcgccgtcgacgagcgacgtctggtccacagtccgctgcagcaggcatcatcgtcgccgccgcggggagccgtcgccatctgcatcgctgctgccgcgcgaggagccgtcaccgccgccgcctcgcgcgcgtgaggagccccctccgctgccgcctcccacctcacgcgctgggagccgtagccgccgccgtcaccgccgccatcgcctcccgcctcgcgcgcgtggggagacgtcgtcgccgccgccttcgtcccgatttggctggcgccttcgtcctgattcacgcgcgggggccacatccgcggccctccgcaccgtcgccggcctcgacctcggccctccgcgccgttgtcggccgcgaccgccgccctccgcgccgtcgccggccgcgactgccgccgtcctccgcgcccggggtcgtcgtcgtcgcgagcctccgccgcccccgctgccagcctatgcacagtcaacctccatgcccgcatcgggataggattggtatgggagaagaaaggagaggaaggaggaggaacgagagactgacatgtgggacccgatgttaaattggagaatgtgaatagagagactgttggagtaaaatgcaaacttggctctccaattctttagatggctggccaaatgctcatttggagagcttaaaaatagccaatctgttggagatgttctaactgacaactgacagcaagtcaacaactcctccaaccaaagattctgggatattctctatggcccctattcttttctccaacaaaagttggaaaaaattttggatactcgtggcacgcttttcaaattgttaacgatgcgtttcatgcgaaaactttatatatgaaagttactttaaaatatcatattattttattttttaagtttgtaataattaaaacttaatttatcatatgttaatatcacctcattttgcgtaaaaaatttaatgaggattgaggagaaaagaaccatatgtaccaaaaccaagatgaatttgggcacatcgatgtgatgggcctgtttacctttggattggggatgagatgagcaaatccggcctggcccatattcccttgtgggctcgtgcaatgttgggcccttacggcctgcctatgcgggcaaaaaaacctatccttcctctaccacatctagtaatttccactgacatgtggggtccacacgacggcctgttcccacgagcccacctgtcaggggcggtagtttccacaccaagagacattaccgcgttcagtgcgcaaagcactgccactttgcacactgacaggatgggcccactagcagccacacccaccaatttcctcctcccttcttcctccttcctccttccgctcttcttctctctcttctctgcatctctctctcgtcgggaggagaaaggaaggaagagggtggcaggaggaggaggaggccccccccatccttcctccctcccctgcgctgagctgcgatggcggacggcaacccggacggcatcaagagatacacccctcccgtgcacaggtccgcctcgttttgttccttcttcaatccttagcgtttacgtgagctggggggactcgtaggcgatgagaggtgtggcgtttcttggttggaatctggggggtggccgtagtgaagaatcgcattgggagagcgagttaggaggaggggcgggttgctttgcttgaatcttttgtgggtgagctgatttggttggggggcgtttctttctgatttgggaggcttttgtcgaggagcttgttcgattggatatttcgatttgggtcttttctgagcgtatttttttactgggtatcatgcttcgaggcttgggggcatttctgtgctgatgtggtcgggatcattggaagcttggtgtgttgccgttttgcttagatttgggcggtatattagattttttgagctgctttgatgggcttgatctgtggtgccacgtacaaatctgtgtccagtgtaaatcgaatatcgttttcttttatttggtgttctattggacgttggctttttgtgtttgctcataaagaacgtgtgggttttagtacatatatctttttgtcgcttgcaagctgccgtttttaagttttgtggtggtttattggctcgctggtctctctttttagcttttttgagaatgaacaaccttagcaactaacttttatccttaaaagaatttttttagaaaaatctttgttcaagctacatggctaatctaatggcttatttcagggcatgtttaatgctgacctaactacctgttttagcaagtgaaggatgacccatgattggaatttgggttagcgaattaagctaacatggcttagcaaaactctgccaaacagtcggtcagcttgtataagttaacgcatgactttaacacaacgcatataatgactagcataaagactatcatactttagttacatgtactgccagatattgaaaattgtcctttgataggtgatcgcgtaatcacaatttcacaattataagtggagttcacaatgaagaagtagatttgctaaagacatattgttcaatcagtctatcaccttgttgatttgattagttgataacttgatatggcttctttgttccatctttgtatttatgagctaaatatttattttgtttgaaaccatcagttatttcttgaaatattctgttgtctgcagtctaatgttagttattatttagttttaataatcttgctacatatcatgcatagatatgctttctgatggctatctttactgaatatgcttcaggaaccgtgctaacaatcgacgcaagtctggaggtaaatcacatttaccaattgaatcagttggatttcatgatgttttggggatttattatattttcctttattatttgtttggcttgactgctatataaggtctccaaattagttgataaggtcttatctagttgttggttgttatggtatcaaacttaattcattattcctctagtagatttctatgcagtgaaactgccatgtttcttttccacaaatgggctgaaaaatatgtgccttacaccgaccatgttgataaccactctatatctataaggaaatccttgcaagcaaatatccttgtatgagcccccctactccattgtattaatgatgccaatactctgtacaacatgcaacttcatgcatctaatgcaagctacctgcaatcataatccctacaatcagtcatttacaagtcaaatgtgttttttactcagagtttacttattatgtccaatagctgtccagaatcttctaaccttgacatgtctttatttgattatgcatatttccaataatttttttatgggctatcttttccttatccatgtgttttttttaatgatttatctgtatgtttaagcataacaatttaatttatgaggtgatttttttttggctgacattgtaacacttttgttataccaaacagatagggctgagaaggctagttatttgtacaataatgatggagagaagagccatgctccttcattaaagaaccttccaccaattatccctcatgagacttttttcagcaatcctcagaatgattacagtcaaacaagattaatacccttggagggatgttgtgccagtgaggctgcccagcttctcaatgaccgtatgtttctcagagagaccaagcttcccttttaactgcttgtagaatttctatgatataagttctatctttttgactttctgggaattgttgcatgttattgtggtagtgatacattatgtctacagtaataacatactactccctttgtcccaaaatataagcattttttagcatagtgctaagtcaaccatttttaactttaactattaatagcaaaaaaataaaaaaaaatcaataatgtgaaattgatgttactagatttatcattaatcaaactattattatatgcaactctttttatttaaaacattttatttctatagatattgttggtcaaagtagcatctcgaagactatgtcgtgatccaaaaatgcttatattttgggacggagggagtaagtagtaaaagcacatgcagtatattacagaaccgcccattgctttaataagtttacactggctgataatccaatattcagatactgtaagttgtaaagaaaaatacgtggagcacctgttgtgatttattttggggttctctgcatgttagtagcatggaagaatattcaaactgtgtacctactgcttatcctatcttttttgttcattaatcataccatcaactgttctctttatgtgcaattgtgcatatgccaccagtaatttaccggaagttaggcaacttttaatcaaggatggtctaagcatatataacaaatatgtattcctacagttgctgtactaattttgaaccaactttatttacaaccattcttcttatgtgataataaacctttgctgcttttcccctgtaggttgggctgcagcaatgaacttgtacaatgatcagtcatatgattcccctggtgagtccttaatcaaattcaggccgcatgatgggagatttactatgtcatgaatcatggtagaggaatctttagatattttaggatcaatttctacaagacctggcatactatcctagacctatgtttaatttagattaccgtttcataagttatgatagaaattggaggtgaatataaagtgttggcaacagtagtgacgccgcacaattatggtgatagcaattatagtactgtatagcaattcgtgatgttaatatgttattatgaacaccatcaagtacccaattgtgcactcaagtgaattttcatgtcagttgtaccaacgggaagcactaaaccaaagcccattaaatgctgttgatgttttgccagataagccggtgatgtactctggatctagtggatcatcatggggtcatggtcacatgaaacttcctcatcaggtatattgaacctgcgattttgtcatactgttctcctacgtcttagtttctgtactctgattccttttctgtggtcattggtagtacagatgaacttctctgaggagttgcgccgtgccctagatgagcaaccagtcacaggaccgtctgtcaacacctggaactaatcaagctcaagctgcattggagtgctaagatttacaaaaaagcaatctattgccagttcgctgtgtgttgtatcttgtactgaaactgtatgcatgatgcgactataaatgctttactctaacttgcaactcctttggtttataacagaaacggcaatcctgcccatttgtaaccttatggatggaaagccagcctgctgtatcatgtggagtactttagcatgcagaagtgcagaaccaatgctatatatatatccctcttcttaagggtgaacttttgcagttttgtcagatttgttgcttcgaaagcatttttttgagtaaccttatttatttaagtgaagaatgcaatttgatgtaacatgacaaaaggctcgaatattggcttaagtgaacagatgtatgataaatacacaagacacatctattcatcactgaattttgtggagcagcatctccaaacagtcattgcagagaacagtaaataagtagcacagcaaaatggatcagctattagtgaggatgaaaaatgtcggttttaggcaaattaacatccacctgttgtccgcttgaatgatgtttaaagtaaacagagaggccatgcatctgaatctacaagaaacgagattttcgtcgataatacaggtttgtgactttgtataactacacaaaagagaatggtggacttaagagcctgcataaatttgacaacgtttgacaacgggtgccggtgggcccggtcgggcgcgagacggagacgagtagcacgattagcttcgccgcggctgaggggaattagttcacttggtctggtctgaaattcatctataaaccgaaatatcagatacaaagaaaaaatggttctatagcattgaaaattcatgatttgagttttatattaaaagttttgggttcactttaatagcattgaaatttacattcgttttaatttttagcactctgtcaggaattcagtcaagtttcatacttattttattttttttgtcaaagaaaacatgcaaaataccgataatgtccttctattctttagcctttccgttctcccatcttgcgctcatcctagacttcggccgccgtcctagagcccatccgccccagcagccctcaatcttgcccatgccaacaccctcgaggccgacactcgcctgcggccgccgccctcgagaatgcccaggccggcgctttcgagcagcggagctcgatcgccataggctgccatggcgatgctcgtgtctgggctcgccatgctcatgataacacgtcaccatggccaccggtaattaagttcttgttcctgcacacacagtgatgttgaggcggcgcagattgatcgaccacgatgggctgatggcagtgacaccaataggggcaccaagaagaacctggtgagcagttgagacgatgcaggttgcattcgcatcgtccctggcgttcgtggtcagccgcttgcctctactagtgagcactgaacagcatcggcctggccgatttcagcgtgggcggacgcctacattgttagaaacacagatatgttagttaaagataagagtcaaatacaaatatagggatatgatacaattctagagatagaatcttagagatacaatagagtcctagagatagaatcctagagataatctagagataaatctgctcttacttgtactgtactccaagtttctaactcctatgtactcctatatataccttatgagagaggcgatgtaatagattagaaaacaacataatacaacaattagattttccacataccttggaacttggaagagtgagaaacagagaatcatccttctgtacagtgtgcatattgaactgaagaatagcaaggagttcggaggaggaagaaacaaatggagagggtgactgtgacgaagtgctaaaaaatgtaactgaggtaactttcggtgctataaacctaaaatcgtaaactttcagtgctaaaactgaacataatactgcctaggatcctgattgatccgcttttagctaacgtggcagagtgggacccacatgttagtgaataacacttctcttcctcctctcctctctcttcccctctcccttccatatggtcgacgtcgaccaccgcctgccagtgccgcatggcctcctgcactcaccctcccatgccaccggcctccatcgcctcaccacccatggctctgctatcaccaccctgcgcgtgtcacccgccacagcgtctccctcctcctaccccacagtcgctcccttaccgtccactgtcctcgctcacctcgccaccgctagggtctctgtcctcccaggcctctctgaccccgagctcttccgcgtggcctctagcttcctcctgacctccgtgacctcttcacgatcgacatgccatctggatgggttcccgaactaccgctcctctgctgggctccgccttttccgcttcaccaaggaggaggtccccaccaccatcgccacagcgctgctggtgctccccggtagcctggtggggcgttgctccccgccttcccctcctctcatcccgctctatggttgacggtgctctgcctcactgggaacccggtgttccatgtctccgaatcccttcttactatatagttgtaatccactacaagcattaacttctctaaagcagcctccacgtgaagccacgtcatcaacatcttgcaaccatcggatcaagtgccatcttcgttggttcagcacccatgcagaaaactcttgttgattgacccaacccaacgttttcctccgccgagggtatcaggaccgtcgtgggactgctcgcctcctcaacgtgctgcactggcacaacatcaggaaactgccggcggcgtctcccttttcaccgcaatagcatttattttcattccaatgatgcaaacactgaaacacatcaacttatttgatcaagctcgaaaagggcaattgatcgccattcgcaacagtgcacatgtattgtctatttgactattagcttatttataacatttgttgaagaaacatctgtcttccgaatgttctcaaaattggcctgacaaaattgaccttaccaatccattcatatgtctcaaagttgaccttctatcttcatatcacttataatttgttataaagatttaaatatattctttttgttcaacataacatttagaaagcaacttttacaggtcgatattatgtatatggcaaacaacttcagctggagaaaaaacatgccaatgacaaggtttgcaattattcctctatcattttggccattaaattactattgtccatattaattgttctatcactaacccatctggcctaacatactgacagttgttttttcatatattttttttgacttgaagttgttttttcatatattgtattatgacacctttgtattatcattaaacttgaaacgtcaaccttttagtaaccctattttatcagaattggtcacttttcattcatacaaactatcgtaagcaatctttagttcatcacttagaatccccgccgcaacgcgcggggtatcacctagtatataaggtgatgaggccggatatctcttgaagtttttttttggttgtggtggtagttggggggggggggggtaatacgtaagggaaattcgacaaactattgttcaatatcttccttgtggttttcgaattatggaccaaggttgtgctcgatcgacgagcgaaatctcagatgattcaacattttccgtgtggtttccgaattagctagcttgcactatacgtgctatttttatcacgtttgtaataaaatgcaccggtccagctcacaacaaagtcatttattttcaatagacagggagacccaactctacagctcaattataatttcaaaataaatgatttaaagtccaaatagcatgtcaaaagcattaatcaaatagaactttcgaaaataaagaaatccaacgaaaagcatatggtttaaatgaaaggatggaaaatgaagcaacaaaatgtgcagctcacgaaaagttaaatttttaaaaagaaaatcagagagattgatgggtaaccttttgagctaccctaaaggaactaagattttatccatctagattgggctacacaaattcgacaaccaggttacctactgtttttaggttgggactatgcagtgttttatgaatttttagaccatgatgcaaagactcaaaaaatttagccaaaattcgtggagtctgctgggtatgtctacaagctactgttaaaagatagcatgattatcttttacggtttggactacataaaaagaagaacgccgctgtctaaagatttcagaacacggttatgcacactaattgagtttttaccctatgatacaaaggtccaaaaatcacaccaaaattcatgatgcctattctacatgttccttgtaaaaattctcaggtctatcgtctacggtttagcctaggcaaaattaacagactgactcgaaattccaaaacacgatcaaccgacacagaaagaaacttcattcatgttttaagttacctaaattcctcatcttttgtttacattaggttagggtggtacagaggctatgtgaattttgggtggtccatctaagcaacaatctacaggtttaagcacaacaattttatccttcacaaactacccattctagaccatgtcagtaaaatttgaaatgtcggaagagaggagttcaaaatctaccaaattcattttttttggtgcagagataacataaggagatggaaaccatatcatgtctttcaagatttaaattttatccatccattttcaaatcctataactagaggctatttttaacccgatattttgcaaatccgtactagtacataggtgattgcaaatggatttcaaaacttttcaaaacactttggaactgattttttatgattaataagtgttttcaaactcattttcactttagtacaagctttcaaaaggtctcggtcctatagagcaagataagagttttcaaaatcaaaatagagacctagaggaaagtaatctctagagagggatgatatataaggttgaatatgattttcgcaaaataatttgtagctgagagcaaaaccctcaaaataattttaagaaaccattctaaacgaccaacttaaggggttcctatagttggtattagctctggtaccatgcctgtggaggacacctgaactttacattatatctgccaattgaagtgaacaattcaaatcaagtagcaggcataatgtaaaatccgaagcctcaagtaaaggatataggagacattgctgggactttagcttgccagttaacttcagcctgagatgtgtccgtcaaaccacacgaaggcagtgactagatgtgttacacattcaggaaacttgacgaaaatagctaaagctctacgacatcccaaatatcctaaacccttactcatgtggaactagttcctaggatatccactagcttcacactttcatcttaagcaatgatacacagaagaaaatacaagacaaacaaaattcaattacaactactttagttatacataggccaactagccaaataatcagagattcgcgcaagcttgcctacccaaacaacaagcaaaccgactagggggttgaccccaattagaatctaattcctagaagaaacggttgaaacccgcatcactcaataaacactaagcatacaacctacaaaaatggatactctagtataacaagagtcagtacatcattagaaataatgtactgccaagcctaaagcaattctaacatattacatgcagggcatatattcaaggaaggctatatgtagttaaattttagcgtaaagcaagttttggttcacaattcctttcaaaggagttgatgattcaattaacaaaacaaattctgtaattatatcataaagaacatcatagtaccatcataagcatagctgccttccttggcaaggcataatatcatcatcacacgcgcacacacactcaacacaacacatttcaagagagaaaactagaaatgtttgatacacgcaaaccatgattttcataaaggcttggatgtgcaacaaaatgcatggatgagaaatgaagcgtaacgaagaaaccaataaatcgttagggacaagcaaactatgatttgcataaaatcagtaagctgcaatcaaatgtagacgtctagctcgcaaccaagatattcttcgataaacagggtaacataactataaaaattaaattagttataagtctactattaaaacgtcggagcacaaaaaagccgcaaggattaaatacaagcaaatattttcttttcacaaactagtaagcataagtttatacaaaatttcacaaactaaaataaagctttaaagtccaaagagaagttccaaaaagagaaaaattgtaactgaagaaatcaaacttaaagtaccaagttgaaatttaatgttgaaaaaaaaaccgttacgcgagaaacaaaagtaagattcaacgaaaggacggaaaatgaaacatcaaggaagaaacctagaatcatttgatacaaaaaagccgcaaggtttaaatgcaagcatatattttcctttcacaaacaagtaagcatatgttcgaacaaaattttcgaaagcgtcaacggagaaaccaataaattgttcggacaagcatactacgattttcataaaaccaaatagcatgtcaaaaacattaatacaatagaactttcgaaaataaagaaatccaacaaaaataatatggtttaaacgaaaggatggaaaatgaagcatcaagggagaaaactagaaatgtttgataaaatgaaaccatgattttcataaaggcatagatatgcaacaaaatgcaagggtgcagctcacgaaaagttatggattaaaaatgaagcgtcaacggagaaaccaataaatcgttccgaacaagcaaattatggttctcataaaatcaataggatgcaaccaaatgtagatgtctagcatgtaaccaatatattattttcgataaatagggacacgaaactcttgaacttagttctaagtctacgattaaaacgccagagcacaaaaaagccgcaaggtttaaatgcatgcaactatttccttttcgaatatgggtcagcctacttaggaattcatattatttatgtggctcttacgatgattttgtctttggtgggggtggtatgagaacctatccttgtttggttggtggaatacgatctaaggtgtaatggctatgttgttttccaataacaatacgatattattgattttaaatgtttataaaacttttcaagaatacttgatttagaatctctaaccattaggatgtaacaaggttcaagtcttcatggtctacagtcatgatctaaccttgttgatctcacattcgataaatttaagttttaggacagcaagtaaggcggttgggaaaataaggataaattgaacaaaactctgggttacatcttaggggttgacaatatttgttctccagttgctaattagtcatatgcaatctaatccaaggtgttctaggaatatttgtcgagtcatactggatgcatcaggacggtctcattatgtgcatccataaacttggtcgtggtagaaaacgggatgctagatggcatgtgcagcaataacttttctttttctcaaaaaggcaaagatgtatgtatgatatcatgatgaatgaaatgatgcgatgcatgtatgatatgatacaatgcttatggagatattttgtattgcgtacatgccatagaacaatcctttcgggaaaattgttcttgagactattgatcctactcatggtttttcatgggcattggaatggttgtaactctttatacgctataggctaggataaggtgacaaaattaaacatttttttacctagactcgtaacaaagttctccttatctaggaaagagatggtaattttaaaacaaatggattatcttagagaagttttcaaaacctaaaagtgaagttcctaaaccatgttgtgagttgctacgatgtacaaatcttgcatccgaccgtaaagggtcacaaaatttgcacactgagccatctcatcttaaattacatagtttgcttacgacttgttcctagtatgatatttccatttaggcttgtgggggcttgcaaaggttacatgttgtctctgggtttgtaagttcatggcactctatcccccttaaaataaaataaaattttgcaatggggtttatcaagaaatttaaatggaagagctaaataggtctatgtgccatatgctgtactatccagtcccgaggcgcaaactgaagcaaaagactatgctagatgggtgataaattagaaaaaaattatatccatgatcctaacaaagttttctcctatctgggaaggaatgttgattttttggacaaatagattattttagagaaattgggcaagacaagtgatgcagtgctggaatttatcggtctactatctttacctaatttttaggtaagttctaaaggttcataagaaatttttaaaaagaaaatcagagagattgatgggtaaccttttgagctaccctgaaagaaccaagattttatcccttctagattgggctacacaaattcgataaacaaagtatttttttttcgataaacaaggtaacgtaacaacaaaaattaaattagttataagtctactattaaaatgccggaacacaaaaaagccgcaaggtttaaatgcaagcaaatattttcttttcacaaactagtaagcataagtttatactacaaaatttaggaaattgagatttcaaaacgaaaataaagctttatagtccaaagagaagttccaaaaagagaaaatttgtaattgaagaaatcaaacttaaagtaccgagttgaaacctaatgttgaaagaaaaacccgttacgcaagtaagattcaacgaaaggacggaaaatgagttataagtcgaaaatgaaaatggtagagaacaaaaaagcccaagatttaaatgcaaggaaatattttcttttcactaactagtaagcataagttcaatcaaaatttaggaaatctgatatttcaaaactgaattaaagctttaacgtccaaagagaatatcaaaagcattagtaggagagaaagttcgaaaacaaagaaatccaactaaaagcgttcagtttgaatgaaaggacggaacattgaagcgtgaagggacaaacctaaaaacgatccatacaaggaaatcaagatttttatagaagcttcaaggtgcaacagaatgtatgggtccagtttacaacgatgttatttgttttcaataaacaagaagacgaatccaaataactcaattaataagttcaaaattaacgtcagagcaaaataaaacggtcaggcttcaatgcaaaagaatattttgcttttataaaacagaaaaaaaaagttcaaacaaacttaaggaagattaaccgtgacaacgaaaaaaattgcaaactccaaaaaggatatttgaagaatcaatgcaagaagaacattacaaaatcaaggaatccaactaaaagtacaaaattttaaacttatggataaaaaataaagcgtcaacgaagaacccataaatcgtttggaacaagtaaactacggttttcataaaatcaaaatgatgctaccaaatgtagaagtctagcccgcaaccaagatattttttcgataaacagggaaacgtaactctagaacttagttataagtctacgattaaaacaccagagcacaaaaaagccgcaaggattaaatgcaagcaatattttcacgaaccggtaagcataagtagatacaaaatttaggaaattgagatttcagaactaaaataaagttttaaagtccaaagagaagttccgaaaagagagtacctagttgaaattcaagtgtgaaaaacaaccgtcacttgagaaaccaaaataaagttttaaagtgcagttagcgtgtcaaaagcattaatacaagagaactttcgaaaataaataaatccaacgaaaagcataatgtttaaaggataggttggaaaatgaagcatcaagggagaaaactagaaatgtttgatacaaagaaactgtgacttttataaaggattagatgtgcaacaaaatgcatcggtccagctcacaaaaggttatttgttttcaataaacagggagacccgactctacaactcaattataagttcaaaattaacgtcggagcaaaataaaacggttaggcctcaatgtaaaatgaatattttgttttgttaaaccagaaaacaaagttcaatcaaactttacgaagacgaaccgtgacaaccaaaaaaaaaaggaaactccaaaaaagatatttgaagaatggatgcaagaagaacgttacaaaatctagaagcgtcaacgaagaaaacaataaattgttagggacaagcaaactacgattttcataaaatcagtaagatgcaaccaaatataacgtaaacccgcaacaaagatattttttctcgataaacagggtaacgtaactatagaaattaaattagttataagtctactattagatcatcagagcaaaaaaaaagccgcaaggtttaaatgcaagcaaatattttcttttcaaaaaactagtaagcataagtttatacaaaatttaggaaattgggatttcagaactaaaataaagctttagagtgcaaatagaagttcaaaaaaagagaaaatttgtaattgaagaaatcaaatttaaagtaccaagttgaaacttaatgatgaaaaaaatcgttacacgagaaagaacaggaaatatttaaagtccaaatagcagaacgttaaaaaaaaagcaatccaactaaaagcataaagtttaaatgagaagacggaaatgaagcgtcaagggagaaacccataaacgtttggtacaaggaaaccatgatttttcatgaacttaaggaagatgaactgggacaacgaaaaaaaaaatggaaacaccaaaaaggacatttgaagaatagatgcaagaaaaacgttacaaaatcaaggaatccaactaaaagtaaaaaacttaaacttatggatgaaaaataaagcgtcaacgaagaaccgataaatcgttcgaaacaagcaaactaccgtcatcataaaatcattaggatgcaaccaaatgtagacaaaaaataccaagttgaaacccatggagtaatataaaaaaaaggtcacacgagaaaccaaaataaagtattaaattccaaatagcagatcaaaagtattaatagaggagattgttcgaagataaagaaatccaactaaaaacataaagtttaaacgagaggacggaaaatgaagcgtcaagggcgaaacctagaagcgtttgatacaaggaaaacgtgattttcaaaaaccttcaaggtgcaaaaaaaaaaaaatgcatgggtccagctctcaataaagttatttgttttcgataaacatggagacccaactatacagctcaagtattcaagttatttgttttcaataaacggggagacaaaactctacaaatcaactaaaagatcaaaattaacgacaaatcaaaataaatcggtcagagcttaatgcaaaagaatattttgtttttataaaccagaaaacaaagttcaaacaaacttaaggaagacgaaccgtgacaacaaaaataattggaaactccaaaaggatatttggagaattgatgcaagaagaatgtttcaaaatcaaggaatccaactaaaagtacaaaatataaatttctcgatgataaatgaagcatcaacggagaaaccaagaaatcgtttggtacaaccaaactacgattttcataaaatcaattagatgtgaccgaataaagacatccagctcgcaactaaatatttttttgataaaaaaaggagacgtaactctagagtttaaatataaggcgaaaattaaaacgtcagagcacaaaaaagccgcaaggtttaaatgcgagcaactattttttttcacaaactagtaagcaaaagttcatacagaatttaggaaataaagctttaaagtctgaagagaagttccaaaaagagaatctttataattgaagaaatcgaactaaaagtaccaagttagaacttaatgatgaaaaaaatagatcgtcacgcgagaaaccaaagtaaagttttcataaaccaggtatcaaagttcaaaccaacttaaggaagacgaacggtgataaccgaaaaatttggaaactccaaaaaggatatctgaagaatgaatgcaagaagaacgtttgaaaataaaggaatccacttaaaagtacaaaatttaaaacttacggatgaaaaatgaagtgccaatggagaaaccaataaatcgatcggacaagcatactacgattttcataaaaccaaatagcatgtcaaaagcattaatacaatagaactttcgaaaacaaagaaatacaacgaaaataatatggtttaaacgaaaggatggaaaatgaagcatcaagggagaaaactagaaatgtttgataaaatgaaaccatgattttcataaaggcatagatgtgcaacaaaatgcaagggtgcagctcacgaaaagttatggattaaaaatgaagcgtcaacggagaaaccaataaatcgttccgaacaagcaaactacggttctcataaaatcaataggatgcaaccaaatgtagatgtctagcctgtaaccaagatattgtttttcgataaatagggacacgaaactcttgaacttagttctaagtctacgattaaaacgccagagcacagaaaagccgcaaggtttaaatgcatgcaagtatttccttttcgaatctgggtcagcctacttaggaattcatattatttatgtggctcttacgatgattttgtctttggtgagggtgttatgagaacctatccttgtttggttggtggaatacgatctaaggtgtcatggctatgctgttttctgataacattacgatattattgattttaaatgtttataaaacttttcaagaatactagatttagaatctctaaccatcaggatgtaacaaggttcaagtcttcatggtctaaggtcatgatctaaccttgttgatctcacattcgataaatttaagttttaggacaacaaggcgattgagaaaataaggataaattgaacaaaactttgggttacatcttaggggttggcaatatttgttctcctggtgctaattagtcatatgtaattctaggaatatttgtcgagtcatactggatgcaacaggacggtctcattatgtgcatccataaacttgggtcgtggtagaaaacgggatgctagatggcatgtatagcaataacttttctttttctcaaaaaggcaacgatgtatgctatgatatcaagatgaatgaaatgatgcgatgcatgtatgaaatgacacaatgcttatgaagatattttgtattgcacacatttttttttgatggaaggcaaaagctcatgccatacatgccatagaacaatcctttcggaaaaattgttcttgagactatttgtcctactcatggtttatcatgggcatgggaatggttgctactctttataggctttaggctaggataaggtgacaaaattactttttttttactcagactcgtaacaaagttctccttatcaaggaaagagatggtaattttaaaacaaatggatcatcttagagaagtttgcaaaacctaaaagtcaagttcccaaaccatgtttgtgagttgctacgatgtacaaatcttgcatccaaccgtaaaggggcacaaaatttgcacactgagccatctcaacttaaattacatagtttgcttatgacttgttcctagtatgatatttccatttaggcttgtgggggcttgcaaaggttacatgttttgtctctggtttgtaaggtcatggcactctattccccttaaaataaaataaaataaaattttgcaatggggtttatcaagaattttaatggaagagctaaataggtctatgtgcccatatgctatactatccagtcccgaggcgcaaactgaagcaaaagactatgctagatgggtgataaattagaaaaaaaactatattcatgatcctaacaaagttttctccaatctgggtaggaaaggtaattttttggacaaatagattattttagagaaattggtcaagacaagtgatgcagtgctagaatttaccggtccactatctttacgtaatttttaggtcaagttctaaaggttcaaaagaaatttttataaagaaaattagagagattgatgggtaacctttttgagctaccctaaacgaaccaagattttatcccttctagattgggctacacagattcgataaacaaggtatgtttttcgataaacagggtaacgtaagtatagaaattaaattagttattagtctactattaaaacgtcggagcacaaaaaagccgcaaggtttaaatgcaagcaaatattttcttttcacaaacaagtaagcatacgttcaaacaaaattacagaaattaccattttagaagtaaaataaagcattcaattctaaagagaagtttcaaaaagagaaactttgtaattgaagaagtcaaacttaaagtatcaagttgaaacttaatgttgaaaaaaaaccgttacgcgagaaacaaaagtaaagattcaacgaaaggacgaaaaatgaaacataagggagaaacctaaaaacgtttgatacaaaaaagccgcaaggtttacatgcaagcaaatattcttttcacaaataagtaagcatagattcaaacaaaattttggtaatttacattttagaattaaaataaagatttaaagtgcaaagagaagttccaaaaagagaaactttgtaatcgaagaaatcaaactaaaagtaccaagttgaatctgaacaatgaaaaaagaaccgtcccgcaggaaaccatagtaaagttttaaagtccaaatacacatcaaaagcatgaatacaagaggctaataaatcgttcagaacaagcaaaaactgcggttttcataaaatcgaaaggatgcaaccaaatatatacgtctagcccgcagcaaagatattttttcgataagcagggaaacgtaactctagaacttagttataagtctacgattaaaacgtcatagcacacaaaagagccgcaaggtttaaatgctagaaatattttcacaaaccagtaagcacagtacatacaaaatttaggaaattgagatttcagaactaaaataaagttttaaagttcaaagagaagttccaaaaagagagtaccaagttaaaattcaagtgtgaaaaaacaaccgtccctcgagaaaccaaaataaagttttaaagtgcagttggcgtgtcaaaagtattaatacaagagaactttcgaaaataaataaatccaacgaaaagcataatgtttaaacgatagaacagaaaatgaatcgtcaagggagaaacctagaaatatttgatacaaggaaaacatgattttcataaaagctttaaggtgcaacaaaatgcatgggcccagctcataacaaagttatttgttttcaatacacagggagacccaactatacacacaactataagctcaaaattaacgtcagaataaaataaaatggttggtcatagcacaaaaaagccacaaggtttaaatgcaagcaaatattttcttttcacaattaagtaagcataagttcaaacaaaattacaaaaattgccatttcagaagtaaaataaagctttcaactctaaagagaagttccaaaaagagaaactttgtaattgaagaaatgattcaacgaaaggacgggaaatgaaacgtcaagggagaaacctagtaacgtttgataaaaaaagccgcaaggtttagatgcaagcaaatattttcttttcacaaacaagcatagattcaaacaaaattttggtaatttacatttcagaactaaaatagcatgtcaaaagttttaaagtccaaatagcatgtcaaaagcatgaatacaagagaacattcgaaaataaagaaatccagcagaaagcatacagtaaaatgaaaggatgtaaaataaagcgtcaagagagaagcctagaaatgttttatacaaggaaactgtaattttcagaaaagattgaacgtgcaacaaactataagggtccagctcacaaaaaagttagttgttttcaataaactgggagactcaactctagaactaacggcagagcaaaacaaatcggtacggcttaaagcaaaagaatattttgtttttataaaccagaaaacaaagtccaaacaaacttcagaagatgaaccgtgacaacaaaaataattggaaactcaaaaaaagatatttgaagaatgtttcaaaatcaaggaatccaattaaaagtacaaaatataaatttctcgatgaaaaatgatgcctcaacggagaaaccaagaaattgtttggtacaaccaaactacgattttcataaaatcaataagatgcaaccgaatgtagacatccagctcgcaaccaaaatattttttttttgataaaaaggaggcgtaactctagaatttaattataaggccaaaattaaaacgacatagcacaaaaaaaccccacaaggtttaaatgcacacaaatatgttcttgtgaaaaattattaatcataagttcaaacaaaatttcagaaactgagatttcagaactaaaataaagatttaatgtccaaagagaagataaagaaagagaaactttgtaattgaagaaatcaaactagcagaactaaaccgaaactcaaggatgaaaaaacaaccatcactcgagaaaccaaaataaagttttaaagaccaaatagcatgtcaaaagcattaatacaagagaacgctcgaaaataaagaaatccaactaaatgcagtaggtttaaacgaaaggacaaaaaatgaatcgtcaagggagaatcctagaaatgttcgacacaaggaaaccttgattttcataaaagcttcaaggtgcaacaaaatgcatgggcccagctcacaacaaagttatttgttttcgataaacagggagactcaactctacaactcaattataagagcaaaataaatcaattaggcttcaatgcaaaagaatattttgtttttataaaccagaaaacaatgttcaaacaaccttaagatgaaccatgacaacagaaaaaaattggaaactccaaaaaggttatttgaagaatcgatgcaagaagaacattacagaatcaaggaatccaactaaatgtaaaaaaattaaacttatggatgaaaaatgaagcgtcaacgaagaaacctataaatcgttcggaacaagcaaactacggttatcataaaatcaacaggatgcaaccaaatgtagacgtctagaccgcaaccaagatattttttcgataaacagggaaacataactctagaacttagttataagtctacgattaaaacatcagagcacaaaaaagccgcaaggactaaatgcaagcaatattttcacgaaccagtaagcataagtacataaaaaatttaggaaattgagattacagaactaaaatatagttttaaagtccaaagagaagttccaaaaagggagtacctagttgaaattcaagtgtgaaaaacaacgtcactcaagaaaccaaaataaagttttaaagtgcagttagcgtgtcaaaagcattaatacaagagaactttctaaaataaataatcgaacgaaaagcataatgtttaaacgataggttggaaaaggaatcgtcaaagggagaaaactagaaatgtttgatacaaggaaaacgtgacttttataaaggattagatgtgcagcaaaatgcatcattccagctcacaaaaggttatttgttttcaataaatagggagacccgactctacaactcaattataagttcaaaattaacgtcagagcaaaataaatttgttaggcctcaatgcaaaatgaatattttgttttattaaaccagaaaacaaagttcaaacaaactttatgaagaagaaccgtgacaaccaaaaaaaaaattggaaaccccaaaaaagatatttgaagaatggatgccagatgaacgttaaaaaatctagaagcgtcaacgaagaaaacaaaaaatcttgagggataagcaaactgtgattttcataaaatcagtaagatgcaaccaaatatagcataaacccgcaaaaaagatatttttttcgataaacaggataacgtaactatagaaattaaattagttataagtctactattagatcatcagagaaaaaaaagccgcaaggtttaaatgcaagcaaatattttcttttcaaaaaccagtaagcataagtttatacaaaatttaggaaattgggatttcagaactaaaataaagctttaagtgcaaagagaagttcaaaaaggagaaaatttgcaattgtagaaatcaaacttaaagtaccgagttgaaacttaatgatgaaaaaaaatcgttacgtgagaaagaataggaatgatttaaagtccaaatagcaaaacgttcacaaaaagaagtaatccaactaaaagtataaagtttaaatgagaagacggaaatgaagcgtcaagggagaaacccataaacgtttggtacaaggagcgatttttcatgaacttaaggaagacgaaccgtgacaacgaaaaaaaattggaaactccaaaaatgacatttgaagaatagatgcaagaagaacgttacaaatcaaggaatccaactaaaagtacaaaatttaaacttatggatgaaaaataaagcatcaacaaagaaccgataggataaatcattcggaacaagcaaactacagtcatcataaaatcaataggatgcaaccaaatgtagacagaaaataccaagttgaaacccatggataaaaaaaaaggtcacacgagaaaccaaagtaaagtattaaagtccaaatagcaaaccaaaagtattaatagaggagatcgttcgaagataaagaaatccaactaaaaacataaagtttaaacgagaggggcaaaacctagaagagtttgatacatggaaaccatgatttttcaaaaaccttcaaggtgcaacaaaatgcattggtccagctctcaataaagttatttgttttcgataaacatggagacccaactatacagctcaagtattcaagttatttgttttcaataaacggggagacaaaactctacaaatcaactaaaagatcaatattaacgacaaatcaaaataaatcggtcagagcttaatgcaaaagaatattttgtctttataaaccagaaaacaaagttcaaacaaacataaggaagatgaactgcgacaacaaaaataattggaaactccaaaaaggatatttggagaattgatgcaagaagaatgtttcaaaatcaaggaatccaattaaaagtacaaaatataaatttctcgatgataaatgaagcatcaacggataaaccaagaaatcgtttagtacaaccaaacatcataaaatcaattagatgtgaccgaataaagacaaccagctcgcatccaaaatattttttcgataaaaaagaaggcgtaactctagaatttaaatataaggccaaaattaaaacgtcatagcacaaaagccgcaaggtttaaatgcgagcaactatttatttttcacaaactagtaagcaaaagtccatacaaaatttaggaaatggagacttcagaactaaaataaagctttaaagtccaaagagaagttccaaaaagagaaacaatataattgaagaaatcgaactaaaagtaccaagttgaaacttaatgatgaaaaaaaagaccgtcacgcgagaatccaaagtaaagttttcataaaccagttatcaaagttcagaccaacttaaggaagacgaacagtgataaccgaaaaatttggaaactccaaaaaggatatttgaagaatcaatgcaagaagaacgtttgaaaataaaggaatccaactaaaagtacaaaatttaaacttatggatgaaaaatgaagcgccaataaagaaaccaataaatcgttcggacaagcatactacgattttcataaaaccaaatagcatgtaaaaagcattaatacaatagaactaaaaataatatggtttaaaaaaggatggaaaatgaagcatcaagggagaaaactagaaatgtttgataaaatgaaaccatgattttcatcaaggcatagatgtgcaacaaaatggaagggtgcagctcacgaaaagttatggattaaaaatgaagcgtcaatggagaaaccaataaatcgttcggagcaagcaaactacggttctcataaaatcaataggatgcaaccaaatgtatatgtctagcccgtaaccaagatatttttttcgataaacagtgacacgaaactattgaacttagttctaagtctacgattaaaatgccagagcacagaaaagccgcaagatttaaatgcatgcaactatttccttttctaatatgggtcagcctacttaggaattcatattatttatgtggctcttacgatgattttgtctttggtgggagtggtatgagaacctatccttgtttggttggtggaatacgacctaaggtgtcattgctatgttgttttctaataacaatacgatattattgattttaaatgttcacaaaacttttcaagaataccagatttagaatctctaatggcaattaggatgtaacaaggttcaagtcttcatggtctacggtcatgatctaaccttgttgatctcacattcgataaatttaagttttaggacagcaagtaagacggttgggaaaataaggataaattgaacaaaactttgggttacatcttaggggttggcaatatttgttctccgggtgctagttagtcatatgcaatctaatccaaggtgttctaggaatatttgtcgagtcatattggatgcatcaggacggtctcattatgtgcatccataaacttgggtcgtggtagaaaacgggatgctatatggcatgtatagcaataacttttctttttctcaaaaaggcaaggatggatggtatgatgtcatgatgaatgaaatgatgcgatgcatgtatgaaatgatacaatgcttatgaagatattttgtattgcatacatgccatagaacaatcctttcgggaaaattgttcatgagactactgagcctactcaaggtttttcatgggcatgggaatagttgcaactctttataggctttaggctaggataaggtgacaaaactacaaaaaatttactcagactcgtaacaaagttctccttatctaggaaagagatggtagaagtttttaaaacctaaaagtcaagttcccaaaccatgtttgtgagttgctacgatgtgcaaatcttgcatccgaccgtaaaggggcacaaaatttgcacactgagccatctcaacttaaattacatagtttgcttacgacttgttcctagtatgatatttccatttaggcttgtgggggcttgcaaaggttacatgttgtctctggtttgtaaggtcatggcactctatcccccttaaaataaaataaaataaaattttgcaatggggtttatcaagaaattttaatggaagagcaaaataggtgtatgtgcccatatgctgtactatccagtcccgaggcgcaaactgaagcaaaagactatgctagatgggtgataaattagaaaaaaaaaagtatattcatgatcctaacaaagttttctccaatttgggtaggaaaggtgatttttttcgacaaatagattattttagagaaattggtcaagacaagtgatgcagtgctagaatttaccggtctactatctttacgtaatttttaggtcaagttctaaaggttcaaaagaaatttttaaaaagaaaattagagagattgatgggtaacctttttgagctaccctaaacgaaccaagattttatcccttctagattgggctacacaaattcaataaacaaggtatgtttttcgataagcagggtaacgtaactatagaaattaaattagttattaccctactattaaaacgtcggagcacaaaaaaagccacaaggtttaaatgcaagcaaatattttcttttcacaaacaagtaagcatgcgttcaaacaaaattacagaaattaccattttagaagtaaaataaagctttcaattctaaagagaagttccaaaaagagaaactttgtaattgaagaagtcaaacttaaagtatcgagttgaaacttatttttaaaaaaaaccgttacgcgagaaacaaaagtaaagattcaacgaaaggacgaaaaacgaaacataagggagaaacccaaaaacgtttgatacaaaaaagccacaaggttaacatgcaagcaaatattttcttttcacaaataagtaagcatagattcaaacaaaattttggtaatttacatttcagaattaaaataaagatttaaagtgcaaagataagttccaaaaagagaaactttgtaatcgaagaaatcaaactaaaagtaccaagttgaatctgaacaatgaaaaaagaaccgtctagcccgaaaaaagcatgaatacaaaagactaataaatcgttcagaacaagcaaaaactgcggtgttcataaaatcgaaaggatgcaaccaaatatatacgtctagcccgcagcaaagatattttttcgataagcagggaaacataactctagaacttagttataagtctacgattaaaacgtcatagcacaaaaaaaacagcaaggtttaaatggtagaaatattttcacaaaccagtaagcacaagtacatacaaaatttaggaaattgagatttcaaaactaaaataaagttttaaagtgcaaagttaagttccaaaaagagagtaccaagttgaaattcaagtgtgaaaaaacaaccgtccctcgagaaaccaaaataaagttttaaagtgcaattacaaaaaagccgcaaggtttaaatgcaagcaaatattttcttttcacaaacaagcataagttcaaacaaaattacagaaattgccatttcagaagtaaaataaagctttcaactctaaagagaagttccaaaaagagactttgtaattgaagaaatcaaactcaaagcaccgagttgaaacttaatgttgaaaaataaccgttacaccagaaacaaaagtaaaagattcaacgaaaggacgggaaatgaaacgtcgagaaacctaaaaacgtttgataaaaaaaagccgcaaggtttagatgcaagcaaatattttcttttcacaaacaagcatagattcaaacaaaattttggtaatttacatttcagaactaaaatagcatgtcaaaagttttaaagtccaaatagcatgtcaaaagcatgaatacaagagaacattcgaaaataaagaaatccaacaaaaagcatacagtttaaatgaaaggatgtaaaataaagcgtcaagagagaagcctagaaatgttttatacaaggaaactgtgattttcagaaaagattgaacgtgcaacaaactataagggtccagctcacaaaaaagttagttgttttcaataaactgggagaggcagctctacaactcaattaaaagatcaatattaacggcagagcaaaacaaatcagttagggcttaaagcaaaagaatattttgttttttaaaccagaaaacaaagttcaaacaaacttaaggaagatgaaccgtgacaacaaaaataattggaaactccaaaaaggatatttgatgaattgatgaagaagaaagtttcaaaatcaaggaatccaattaaaagtggtacagccaaattacgattttcataaaatcaataagatgcgaccaaatgtagatgtccagctcgcaaccaaaatatttttttcgataaaaaggaggcgtaactatttaatttaattataaggccaaagttaaaacgtcatagcaaaaaaaaccataaggtttaaatgcacacaaaaatgttcttgtcaaaaactattaagcataaattcaaacaaaatttaggaaactgggatttcagaactaaaataaatatttaaagtccaatgagaagataaagaaagagaaactttgtcattgaagaaatcaaactaaaagtactaaattgaaactcaagaacgaaaaaacagttgtctctcgagaaaccaaaataaagttttgaagagactaaatagcatgtcgaaagcattaatacaagagaacttttgaaaataaataaatccaacgaaaagcttaatgtttaaacaataggatagaacatgaatcgtcaagggaaaaacctagaaatatttgatacaaggaaaacttgactttcaaaaaagcttcaaggtgcaacaaaatgcatgggcccagctcacaacaaagttatttgttttcgataaacaaggagaccaaaatctacaactcaattataagagcaaaataaatcaattagtcctcaatgcaaaagaatattttgtttttacaaactagaaaacaatgttcaatcttttcacgaactagtaaacataaatacatacaaaacttaagaaattgagatttcagaactaaaataaagttctaaagtccaaagagaagttccaaaaagatagtaccaagttgaaattcaagggtgaaaaaacgaacatcactcgagaaaccaaaataaagttttaaagtccaaatagcatgtcaaaagcattaatacaagagaactttcgaaaataaagaaatccaacgaaaagcataaggtttaaatgaaaggatggaaaatgaagcgtcaagggagaaaattagaaacatttcatacaaggaaaccatgattttttataaaaccttcaaggtgcaacaaaatgcatgggtccagctctcaataaagttatttgttttcgataaacatggagacccaactatacaactcaattttaagctcaaacttaacgtaagaacaaaataaaacggttgtcttcaatgcacaagaacattttgttatcataaaccagaaatcaaagttcaaacaaaattaaggaagacgaaacgtgacaagcgaaaaaattggaaactccaaaaaggatatttgaagtatcgatgcaaaatgaacgtgacaaaggaacaccaaactctaaaaatccaaccaaaagtaccaagctaaagcataagagttcaaatagagcttcagtccaaaatctagagaatgtatttatggataaaaggaagcaccagcttgtaaaaagccaaaaaaaaaagtaataaggtaaacatttataatccaaatacaagtgtccaggaagaaaccaattcagtgttttttgggggaaaacgaattacaaattaaaagggtcacgcgtgaactagaatatcatatttctgagtaccagatttaaaaaaaccaaatctaaattttctgaatcccaataaaagtatcaaggatgataccaagtaatgacaaaacaaatcgtaatttttggataataaattagaaataccaaattaaagctttagaatgctgatagaagtgtgaagcaacaaatgattaaaaaagaaacatcaactttaataaaagtaggcatatagaactgaatctgtttagtccaaatagaagtatccagtaagaaacaagtagtatttgttgggcaaaggtaaaaaacactcaataccaaattaattgccatgcaagaaacatatttcaatgaaaaggaacttcataagtaccaaagtagagtctcaaaatccaatcagaaatgcagaattaaagctttaaaatacaagcaaaagcatcgaacacacaaaacttaacatcaaattctgaacaaaaaacaattgtaggttacaaactgaacatgtataatccatataaatgcatcgattaacaaatcaagaaatgttattcaaaataatcaagggatgttactcaaagtttagaataccaaaaaagtatcaagcagagaggaggagaatgtttgttgccctttgtattttaaagcttctaaattggtaattgtagcaggttttccatttgtcttcctttctagaaaaaaaaaacttatcttggtaccctttaataaattggttctgctaggtataagctgataacggaattttacagtaagaaatttgcaaatatctgaatatatatcatcaatgtactattgtacttgaaagaaataccacatacatgaagaatgcaaattaatttgtcattcccagtgtattgaaatttccaaattcgcatgcccctaaccacagacacagattcacatcccccctccccaacacacacacggacagaaaaacacaatcccaaaaaatcattcattacaaagataaattaaaattaatttagtagtttcctattatttttttaaaggtaaatctgagccatagttgccattagcaatattgagtatcccaacctattattgccatgttatagaagcaaggcaacaggacatcattgtattaacaaatacaagaataaataacccaaaaattttaacttgtaaacaaatgtacaattcattctactctatgccatcattttaacatgaaattagcaatcacttactggttgtgcagaccataacttgctcatgataagattgtaacagctaatagcattttttaggggatatcctagtttttttaataaaacacaggacagaatcatacgaatcaaatatattaataacagtaaagggagaatatgtacaagaattacacacaaggcatttacgaagaaaataatgaaaaccagattttcaccagtataaaataaaacttacgcttggaataatgggcacagcatctgttaatggtataatgccctctcattacttcttgtgtgggatttaataaacaacgtgggtcaataaagtgtttgtcaagtgccaaaacctgccatatgttccacataatatcattcaaatatttgctttcacctgagcaaatagccaaccagattaagaaatctctacttcaattaaatgcagagcggagcaaatagattccattactcttaaatatttgactttgtcttggaaatgctattagctcatattatcatagatagttttttttttaactaaactatatatcagagattagaaatgcgcattttactaaagtttgttgttggctacaactacgatttgcaaagctcaacgaactgtcattttagtgtattttgctcttggaaggtacagcctgctagtttcaccaagaactgtcatatttgttttgaaagaattgcttttctacctaataaaatacccatgctaaggctatggtgccgtttgataatgcaaaccaaacaaataaaatgattatatattgttctgattcctaaaaataatatctatagaaagtgtaccgttccttaaaatagaatataaagaaatggatttctataggatatacatgcatagcaatcaaacttaaattaaataagccagtaatttgcataatttacatatattgaattagtgaagtgagcatttggatctacctgcactgtctcaagatatcaacaaagtaggcatctctagtacacagtctcatctcgccactgcaaagaaataaagttaaataaaggaacagacaaaggtgaaaggaaaaaaatcgttaaatgaagtccaatctcaaaatactctacctcttccttgctgtctcctcaacccttaaacttcacaaaagaacaagaaatcctaaaaccatcacagtttctgcaaactggaaaagcaggccgttgtatgatcttctcatattgtgttttatttcctatgaccagcgtagtgtcacacgccaaaacttgtttctcacctcccatgacctgatgtcaccaatgcagtgcacctcgatgacaaagaagatatacgacaatacagtccggctgctggttgcactcaagctctcacatggaaggctctatatgatcagatcaatacttctgcttctgccccttgtccaatctgggaatttgtgtagaagaattcagcccccctctgagttcaacaacttgtgcctggcttatcttcaaaaatcgactaccaacaatgacaaatttgcttgtgaagaacatggtgcaaacggtaaaatacgaaatatgcttgcatcaagacgaagacagcgatcacttattcttcaagtgctcctttgctgaagttttcagcgaatcaacgttttcctattaggcacagaaaagaaaagagaaactttatgatacatatagtagaaatgtgaaataaaaaaaataactctttgtgggtaatccaaaaaaacactttggtgaaatgaaaaaacgataatttataacacattctgatctttttacacgtcaagtgttattcgggccatttcatgagataaaccagtagctcctaaaaacatatgaacaattatatttagatgaataatagcattccgtggatactttctgaacgctagcaatatacatctagcaggctagaataaatatatgcatacaccgagtaaaagagattagtgtaaattgagataagcatctttcataaatgaaagagagcagagcataatccatgtgaaaaactgaaaaccattcaaaaaatggaattgaatgataactattaagcctttttctttgcacggattcagcacgaaatgcagcacaaaaattgcacataatggcacaggagggagaggataccgggagtgcattcggcaaacctgcacagggtcgctttcaaggacgacgtcgaggaagccgatggatgatcgcaagctgaaccggtttgacattcacaacggtggcgcaccgtgcgctggatctgcacatgacggagttgaggaggaagatccaatgacgaagtgcaccaggtgacggacctgcaccttcagggccgggtggaacagatcagcgaggcagccacaggttgaaaattatagtcagtacaggttgtggtcagatatttactgagaatcctaaatattatacatgttgttacaagcatttctccaggtggaacagatcggtgaggccaccacaggttgagaattatagtcagtacaggttgtggtcaggtatttactgagaatcctaaatactatagatgttgttacaagcatttctcttagcaatcagtgtaccaactgtagttcacatccttgttcatttcattatatcaaacaaattctgtaggtgcgataacgagatgaactgtccactactgtaaataatctatattataatgtaatcatccatcaatttgccaatgatgccggtaacaagtaaaagatttattgaaacagccaaaatttaactgtgtaaatttggctagcatcatttacttgacattgtatttcagactatgttttacaaatctcacaggattacaaaacatagaccaatgagcaatacgagcaaaattactagagctgtggacaaaattagcctgacatgcaaccaaaagtgcaaacctgagttttttttaaaaaaaagaaagaaaacgatcagagcagtttatatgacttttagagacttgctttacatgagttaatctgaaccttggtcaccggaattgcgctgcatatgtacttctttcgcaatcaggagtcaagttaaaggtgattgaatttaaaacccagttacaaacaagatccaccagggttaaaagaacagaaagtacaaaggcactcacaattagagttcagttcttcggtaatttatctccaagattcagtctcaccgcacttaatggtgtggcagccagaacaatttccaatgctgagaaaaggaaaatattttagtaaatatttccattattagaagctttaatcagttgctataggatatgtagcggtcattgatatattaacagcttgaaaatttgtctgaatttatattgattgcaaagcaacaaatttgtgaacgaaaaaggaagttaaagcaaatttataaatttagacaaatgaccgaaatgacctgttcttgcattatgtgggtgtgttcagattaaaatgtcttagaagacagcattagaacaggttagtcattaaatgaaaaagaaaatttcagaataggtttgtcatcaaatcaaataaaatgcttcagaaggcagcgacatattttatcaaatcaaataaaatgcttcagaaggcagcgacatattttgatctaaggcataaaatccaaaactacttgaactgtaacattactgattttagctaacgtctcataccatcctacatactaagattcataacttgcagagctttcctccctcccactaaagtaccatgacatgcaatactgaaatctaccattaccaaaagaaaacgagaagtgaagaaaagatcaagtagtccaattgaagacatcactgcgcttagcaacaattgctgaaaatattatatccttcaaccagatttttcctgatttttgctgaaaatattatattgacgatgtagaggaggggctgcaagaagttaccaatgaaattgaccttgctaatctggcaatccccaagcagacctgctttgtggctgaccatgtcgttaattcacattcactgccttgcaaagcgtggccaccactatggctgcaacagtcatggtcgtcccttgggagcaggaacagctgggccctgccgacggcgccagcaccccttgcagcggccaagcctgcagtaccagccgatgcccttgccagcacaggaggaccatgcaagcagcccatatttgtggagttggacggtacaacagctccctgcagtcctgcacctagggacgaacatggagttgagcaagctgactaattatgtttcaattaagcccgagcaaaactataaaacaaaaccacactgcaatatgaaaaaaactacggagtaaagcgtagaagtatccagcagtgtgcctatgttatgtttccagggatcctttgggaccctgggtaaattattaaattctagctaaattacgccatgttaactagtataccggtaaatagttacataattcgtatgtattggactcttggtatttttttgttctgggttcatcactggaaatatctattagcacaatgcaagcacatgggaaacagtcggtagtacatgacgaccaacatccatagtactaagtgaaagcatcataatacagaggagaagatcagaagaggcacctttggtctcctcgacaatattatgaagtttctttctcttggccatctcttcatagtacttcagtttaagatcttcacactgcacaactgcagcaaaaaaaaatgcttacaaactttttcatcaaatactctaaaacctttacaataatgcaactgatggatataacctaatgcttgaacagctcctaccatcttactcggttcaggaacagcgtttgcatggccatcttgcttcaagagatagcaatgtttgctcttgtttcatgacctgaaaattaaaaagtgatataattagtaaaacatagcacctcatgtatttatcaattcagtaaatctgcttttaccttgattttattttccaagttagatatggcagctgcccataatttattggcatattcgtacttttgggaaacacttctcagttgatcagcttgtctatcaaggacttgttctgtcaggaatgtaaaacagtggtgagcatacagaaacatcttatctgaaaattagaccttgaaggagtaagttgaatctaatatattgtgtcttacctgctattgctaccgtttttcgaatacaaatggcacaaaccatgggacttccccttactcctttgaagtttatgacaaaggcaccgtcactctcaactgttaccctaatatcacgcatatgaaggggtctgttacctccaaccactgcatacacatcaaattcagacaaaatctgtgcatcaatcaaaagtcaaattgtttagctaaacctgacaataaattgtgatacaaaattaagagcctcatgaatactgtgtttgcattttcttctagcacaaggacatcaaatgctctaattccttctggcccgtaagtgttcattatctcagcaaatgcagatcaaagaaatagtctccaggagcaagaccatcgattttgtagctggaatttccatatcgaactgagtggtaaagcgaaggatagtcacctcttcaaactatatcctcagatgtcaatattgcatcccctccttcaaagaaagaatcgtcagaaagctttgaagagggttcacaaccctcaattgcactgccaccgacattaatgaacagaacaaagtctcatcacaggcacaagaaggataataagaaacattgtggaactatgatgacatgaccaattaacatttcgataaggtacttccaattttcaatttagaattcaagattatgaaatatccattttggaagcacatcactgatgatggctatcgaagccccttctactcgatattactacagcaccacaattgatgcaaccttgtactctgacatagaaacaatcctattttcttcaaccaatccaatgcccatgactttagtactatatgatgtattatccattcactttgagagcatcaaatgaggccagcacactgatccacttaaaaatagtagctaacatggcagagaatcaagtcaatgaagaacccacaattttaagaagagaaacattactctatcaaatattcaaatctagtccacagaacctaaatcgacgcataaaagctagagcagtatgcaaatgattccacatatagatgattcctgttacatggagataccttattaagctcctagcataccacaacacctgaaggcctcaaaattggattacaactttggcaccgatgtaggtaaagcaccagaaaataccaaatctgggtacatccaacctcctaaatttcctctgccacatgcacacacgcacacacacaagaaaaaataagagcaaatttggaagcaaactttctagggttttctaccagagtcaaatcgagtactctaattcgaccatcctaaacgctcatttcccaaaaaccctttcacgaacatggtgggagggttaggatttaggaatagatcctcacctagcggctagaaccgccattgctgaccaaatgcagattgcaggaaccccacagcgggaagagggagaggaggggaggactccgccgccgccgccgccgccgcgccggcgcagggccaggtggtggccgcatccgcgttcgcggcgtgaggaggagaggagagagagagaggaaaaggtttttactttcttttttttaggacgaaaatacgaccattgctttaagaggaccagaaatatgcccgtagctttaagaggaagaaaaaatgtccgttgcaacggattaattagaaactacggagtactaaatatttagccgcttaacaaatttaggcgttgtttagtttgcgaaaagaaaatttttgggtgtcacatcggacgtttgacccgatttcagaaggggttttcgggcacgaataaaaaaactaatttcataactcgcctggaaaccgcgagacgaatcttttgagcctaattaatccgtcattagtacatgtgggttactgtagtacttatagctaatcatgaactaattagtctaaaaagattcgtctcgtgatttccatgcaaactgtgcaattagtttttttcttttattaatatttaatgcttcatgcatgtgtcccaagattcaatgtaacgtttttggaaaaaaaaaaaaagaactaaaccgggccttaggatgtttgtcccaattgtccctcccatagtcctttttcggtcatatctgtgcgataagtgtagagggacggggtagcccagtctggaccattctgaaattcccaacttaagcatgaaggtgaaaaaactttaatttgtcagtaaattggaccctaatccattcaaataaaatcattagatagaaccacgggatttcaccacaaagacatcgataaattgaagctcaaattgtgcaggaggagtgcgagtgacaagagtgtacgataacttatgtcgagacaacttcgaccatgtagaacttgaccgccatcgctacgggtgggcattcggtctaaccgaaaatttcggtctcggtctttgatctttcgatcttttcggtctttgaaaaataaagaccgaatttcagtgaaaaaatatcaagaccaacaaattcggtctcggtcctgaccgaaattcaacaacattttcatatatgcaaagaaataatggaaattttcaacacaaaaatcacaaaaaaaattcgtaagcactttatgagtaaagactcttattaggttgcatgcctagaagaagtagggatgtgaaaattagagtttaatcctattaaacatagtggattgtaggttgtttttagataatttttgataattcggtctattcggttacccgaggagactaaccgaattgaccgaacaaaattcagtctttcactacctaggaccgaattgatgaccgaatttctcggtctcggtctcggtcttttcggttcggtctttttctgcccacccctagccatcgcaactgcagattgcagtatttcgcttggttatccttctcacacgccgccgctatcgcatgccccatggcagtcgtgctagcagcaccatcaccagtgaggtgtgccgcacggatctcctaggccacttaacgtgggcgttgtaagtggacatgcgggggaactgattgagcagggctgtggtttgcgagggactcgagtggtgtttgatactaatgaaaatgaatattaagtaaggcatgaaaaacaaaaagctattagcatatgattaattaagttttaattattgcaaatttggaaattgaatttatttgatattttatagcaacttttatatagaaaatattcacacgaaacatgccatttagctgtttaaaaagtgtgctaatggaaaccgaggtaaaatatgtatcttaatgaaaaagaaccgggcgtcgctgtgtcaatgtgttatcctgatatatattgtcatggattgatcgagtattcaatcaagtttcctatgtattttgttaccgtcactacaatagaaaccatttttcatagcaccacccttttatttgtactggcggatttaataaatgcacgcttgtaaagatacttaagagggattgcggacaccaaccgccagcaaaaatcgattttcgttggcggccacttaagatatttttacaagcggatctcttaagcgactgccagcgctggcggtcactaaagagcaccgcctttaaaatccaccgcctcataaaaaaaatcagtcacagtgcattaaaaaaccacgcacagcaaaaatcctcagatccactccacattctcctctcctcagatcgacacctctcctcttctccttcctcaccggcgcaccaccgccttactcctctcctcctccgatccctcccaaccggcggcgggtccagcagcagcggcttcggtggcagcaaagaggaggggtggtggcggtgaccggcggcagcaactcccgcgcgtgagtaacagatctggtggtggcggacgggctcggcagagtggggtggcgtaggggagcctagctcctcccctctccatttccggagtggggtgacaaaggggagtatcgtctctccgggctcagcagtgacgattggcggcggcaaaggggatggggtggccgtggcgactcgggcaggatacggaccagcggtggggactcctgcgggtgactgatccggtggcaacagccgagctcgggagagtgaggtggcgcagggaagtctagctcatctcctctctagatctatagtgggtggcacaggggaacctcccctcttcagggtcgacggcggcgaccaacagtggcaagagagccgccgtggtggggttcgtcaatgggcagtgcatgcggccgtggcgactagcggcgctgatttttaattttttttaaccctaaaaaatgttttcactggcggtcatctttaacttgccgctggcgaagatggtatttttgctagtggttgtcttaacatgtcgccagttaaactcgattttccctggcggctggctgaccggtagtgaaaatgtattattttcactggcttttagttcgctggcggcactgtcggctgccagcaaaaatctattttagtcacccgttttcatttttaacaagaaaaaaaatccgtaatctcaattaacccgtggtaatcggaaaaccggatcgataaataccagctcattggatgatcgataaatcagttatcagtggagagctcgatattcggaggggttggcagcgatgcgatgagggcaggatacatcgttgatttggcgtccacagcgagtcggaagcgacggcgtgatccacatcggcctgctgtcttctgccctgccggcgtcgcaggaccacgaaacggcatcgtctggctccgctcgacagaacgagtataggtctaggtatttagcgatgcgctgatctactccctttccgctcgacagaatgagtatagatctaggtgtttagcgatgcgctgatctactccctttctccagttgatgccggccgcaaggattaaaacgtctcgatcttagcagctttgttatttagtttcaccgtcagtctccagttgatgccgcaaggattaaaacgtctcgatcttagcagctttgttatttaatttcaccatcagctgtgatttgatttcatatatgtcaagccaaggcagccgtggcggcctaccgctaccaccagatctcctggatggtggtgtgtactgtttttagtttatacatgaaattctgaatcacatatccacactcagatgagtatacactatttcttattcatctttcttttaatctctctacgtacgtattatttgtctctaatatatatgtattatttgtctctaatatcaccgtattcttccacctaaattttcaaggcggcagtattgtctctaacattacttgtgggctcttgagattttaattgaattaaattgggcctagcccatttattctaataatccccaccaaatttcatggctcacaagaaatgttcttaaaactgaacctatttgttataccattgtttcggtggagactgttaagttaaacttccacctaggaaaagagctacaccagatcacaactgaacaatggactatacattgaattgtcagttttgtgcgatcaggtttcactcgaactcttaactggtactaggctgccgtttacatcccctttgtttggagcatataaatcatattccaagccttttcatgagtatataaagatcaactagatctcatagactgtgactagcagttagacttatataggtatgttccttctaagatgttctgtaggtatctctgctttacgaaaagccactcaaatcacattgaggtatataccatccttccatacagaataggagagaagtacatcatagagatgagcccatttcagggtctctcctctcagtcacccaatagtttctttctccatcctaattcacgggatctccaatcacaaaggacaggttaccactattgggcaactcaagtgggtctcaaacccatctccctcgatgcactgtctatcgcattacgtgatagtcccttagtgaactgatctgctagatttttagctgtcttgacatagtccaatgctatcactctggagtttttctgctttctgacaaacttcagttttctttgtacatgcctggatgacttcatgttgtccttcgaattgtttactttaataattactgtttgattatcacagttcatcaggattgctggtactagtttttcaaccaccgacaagtccatcaggatctaacgaagccactcggcctcaactgttgcagtatctaaagctgtgagttctactttcattgttgacctcgttaagatcgtctgctttcaagacttccagaaaacagcgccatatccaagtgtgaatacatatccacttgtggcctttatcttattagtatcagatatccagtttgaatcactatagtcctccagtacttttgggtacccagtgtagtgatccgacgtcaccgtcgacggtgcgaacatcatgatgttcctcctccacgccttcatagcggagccgctccactgcgcactcctccaacactagctctccgcgtcgatggcctcaccggtgccgtctcccacgtcgtcgtccaccacccacacccacaggagcctggactgtgcaacctagcaaccgggaaggcccgacgctggatcaagttctggacagacaaggagaagagaagggagaggggagagaaagaaagtgatagctaatgacatatggggtccacatgggtctcgtagtgactcagcttgccaagacacctaaaatcggtcacaatactgcctaggacatcgggtgatctgattttgtaaattgagggacttcttatatctggtaattcggtttagaaatgaattttggaagaagctagggaaaattttggtgaaaattccctacatacccctgaaaagtttcataatctcttctatacccctaaattttgtctcaaaactctatatgcccttgagtttttattttgatctcttctatccctattccgttagttgactgttagatttttctaaaatgatcatgtcgcccatttcccatacttacatgctatctactccataattcacaatgtgaaaaaattgtaattcatgataaaatcaaatggggcataattattttttttgtaaaatatgtaaaagaaaatttaaattgttgaacatttttttacaaatccatatgagttttagctagaaattatgaaccaaaattatttatttattagattcaaattttgatgaaaacagtgtaccagtttcataaaagttaatttaaatttatttaaaattttagatttgtttttaaaatttattgtcaaataattatattccctttgtttttttacaaatagatctttttcatataagaattgtgtttttatcactaaactagcacataagtataagagagagataatatagtcaatttcaaaaacatttaacgaaatggatatagagaagatcaaagtaagaacttaggggtatataaggaacgggacaagatttatgggcacacaaggggaacgggataaaatttatgggcacgtaaggggattaaacgaattttcgagggtacaggagattttctcaaaattttgtggggtcaaggtcgtctccgctgcaatggcggtcaagccatgaaggcggcgagaaagaccgccatgccgtgcgcgacggtgccagcccgagaaaaatcaactgacgaagcgacgacgattccttcgaaaatgtagcacgagaggttcggagatcatatccacagtcagattccaaccgagaccaactgcagccgtgcaggccggtgctgatatcctcataacctttttaatatagctgctactggtagctttttaaaagctttatcctgtactaagtatttcttgctttaccactgtgcaggtagctcgccatgctcgtagctttgtttgcggcgttagtactcctctgctactcagccggcaacatccactgcgtcgtggcggtccatggaaacgactccgacatgctcgcgctgctcgagttcaaggatgccatcggcgacgatccggcgggcgtcctgagctcctggaacaaaaccacccctttctgccggtggaatggcgtgaaatgcggccgccgggagcatcgcgtcacggcgctcgagctcgccggccagaacttgaccggtcgactcgccgccgcttctctcgggaatctgagttaccttcacctgcttgacctttctggtaatcgcttctctgggcagatacctcgcctgaacagtctccgaaaattgcaagtcctcaacctgagtaacaatattttggacgggatcattccggacacgcttacaaactgttccagtttgacgcagctagatttgagcataaacttatttcaaggccagattcccctcggcataggactcctctctgagctgtcggatctcgtgctttctcgtaattatctctcggggcacattccttctgagctcgggaagttgtcgaaattgtcgtcgttggacctgagtgtaaatatcatatcaggtgaaattccacgcgccctttataatctctcttctcttcgaatgctattcttggagatgaattttctggggaaatcgttgccgtcaaacattggctatgcccttcctaatctccaatggctcttattgggtgttaacatgtttcaaggtaacataccaggatcccttggcaacatttcacagctacatttgatatatctgtcagagaacaatttctctgggcaaattcctagctctctcggtaagctttcgaacctgtctgtcaaccttcagtacctgcttttggacggaaacaatctatcaggacacataccgtccaacatgggaaatcttcaacaactcacacagctggaccttagttacaataatctaaaaggcaagatgccacccagcttgggaaatcttcagcggctagtgagctttaatctcagtaacaacaatcttcaaggtgatataccatccaagtttggagatcttcaacagctcgtatggctgaacctcggcaacaactacctccatggtgaagtaccatctagcgtggcaaatcttcaacagctcgtcctgttggacctcagtcacaataatctcagtggcaaagtacctcgcagcttgggaaaccttcctaagctcaggcagctggaccttagccacaataattttggtggcaaaataccatccagtctggcaaaccttcgtcaactcagtcgcttggaccttagttataacagtctcaaaggtttctatgcttaacatgccattagtgcgtgaccagtacgttcatataccttttatgcccacttatcagttatcgctgtactatctctctttaggcccaagggtacgtgtcaacgtgtgtcttggtgtctcaagggcactctagtcttttacattctctctctttttttaatgtcttttcccattctcttgttctcaatttattgccctataggcttaaatcaactgattgatacccaacgttttgttgtagaataggtgggtaaatacatgttatacattatgaaaataatagatatatatatatatatatatatatatgtttgaataatgtgaaaaagatgtggagataatgatttgatatggcttgcatattgagttctaaaattacaacaaaatgcaaatgatatgttatgtttgcatgatatttaactactctaaataataattgcccgggcaccatggtatgaaatacacaaattcgtccaaatttttcaaaattttcaaattgtgagtatatacctagttataagttttctattcatacatatacctagcaacaaaacaactcaaatttaactttattttacaatccaatattacatacctaactaattatatgtttagatgctatatacctagaatcaaaatctaacaaaaacatgtttaaatttagttcaaacttgttttgaactagttagtaaagtagttaatgttaacacctaaacatttaaaaaaatttcatactcatttgaattgagtatatacgcaatttgaatcatggagcccgcgcaccatggagctccaaacaaatttaatgaaggggatccattaaccaaccagtccacgtaatggtttattgaattaaacaattaacaaataaataactaaatactagattatggcttgactatcggcagcacacaaacgaacgtacggagcagaaatcgaacgtaccaaccttctgctccgttttaatctaggttttttttttcttacacatgcatgtgcatttaaaaaccgagcagaaggtcttgacgagtttctgtcgagaagagtttttgctttttgttatattctgcatatttttgttagcgttgcagattgttatattaagccgattgatgttctgatctatttcgaaaacgatgttctgcttccttcctaactgatgttgttctccttgtgtgctgcacatgccgttcataaccatgcgtgcaacgactggccgcaaaactagcaatgagtaaaactacaacgagcagaaaattttctgccttcttaacgtcttctgcttagtgatgattttgttggaggagcagaagatgttctgcttctgttcaaattatttttctgctccctttctaatcgatgttctgctcctttcccgggtcacatactcacatactgcctgcctcctttcctgtttctgctcattttcaagttttataagcttcatatagacgatgagattcagtttaacaggcagaaggtattctgcactttgtattccttgctctatattctacgttcttacaaattgtaaatgacctgaatggacttatggacacaacagattagaagtcacgaattatgggttggggaggaaaagatgttctgccattgtttcttcctagtcgtatgtctaatagtgaatggaatcagtttgtgaaagagcagaagatattctgttatcctactatccattgattcaggagcgggattatagctttctgctgcacaaattctgttctgccgtaaattctgtgcagaagagtttcatcccttacctcggctgtgtgttgtacatttatacaagcagaaactatcccgagcagaaattcagatatgcaaaatatgaaatacgttttatttaagtacgtacacataataaactacaattagtaatcaataggcataatatgtactgccgttacatagagaaaattttagtatttgttgtgccaacatttattttcccgatgatgttctgccattttttttcctgatgttctgccatttttttcaattggcgggctatatatcttttgcctatcagaagcagagcatattctgccaaggcgagcacgcgtgaggaagaaactccatccgaatgttgatttgcatgcagccgatgatttagcacttatctgaactaataaatcatttagttaattacttaattaaacagctcggtctgttattccactaacccgatccgctaagggataggagtaactactggggacacctaataggcgggtgatcgctctccctctcccggccctccccttactccaatgctccctcctctccccccttcctcctcccctttttctcttcctactacaccataaatatgtaaatttaatatttgacttataaactttgggtctataaactaatatttgaattcaaattcaaatttgaatcgggtatgtaaacttttgacttataaactttgggtctataaactttaggtgtataaactttagatatatagaaatactatatatagaaaatatttgaattcaaattcaaatttgaatcgggtatataaactttaggtctataaactttatgtctataaactttaggtgtataaactttagatgtatagaaatactatatatgaaaaatatttgaattcaaattcaaatttgaatcggatatataaactttaggtctataaaatttaggtgtataaactttaggtgtataaactttagatgtatagaaatactatatataaaaaaaatatttgaattcaaatttaaatttaaataggatatttgaattcaaattcaaatttgaatcggatatatttcaaattcaaatttgaatcgggtatataaacttttgagttataaactttgggtctataaactttagatgtatagaaatactatatatataaaaatatttgaattcaaatttaaatttaaatcggatatataaacttttaatttataaactttgaatctctaaactttagatgtgtaaacttaaggtgtataaactttaggtgcataaatttattaaaataggaaagtaatgcggtgccaaaaaagaaaaccaggtggaggggagaaaatctaatctgatcgctgctagctacccctagcgatcaatcgctagctagcatttccggtaactactcccggtagtaggaaaattatatactactaccgggagtagctactccctccctatgcgccctcaattcgatcgctactaatgccaatgactgttaccgggtctaatgaatcgaatactccctccagcttttatttttctcggtggtcaacagaaggtcgtttatcttctacagtagatccaacaattgaacgaagcctcccgagtttgttgtagatatgaaatttgaaacttgtgtttgtttatccaaagtgagaaagcaggatattttttccgtcgttaaggaagagcagaacattatcgatctaaaattgttctctgcgtttggagggttcataacccaactgaagtcagatttgtagcctcgccggcggctgtgttgcagataacggtgaaagccctggcatggaggattccagttccaaggtttgttatcatattcatctgttatttttttcatcttttggattcttttcctgatctcgattcctttcttgatcgtttctgctcctaattcgctttctttatgttttgcatttgcagcaactttgcagtcctgcagcaggtgcaaatgtatcaggtggtggtggctctagttctgttttcaccagaaactatcatgctggtgtaaatgtaattaggcgataagaaattaagaagtcatgttctgctcccagttctgctgctgtacgccatgttctgctacatctctaccaaatctgcaacatgttctgctcctcagaaatcagatagcagatcatgctctgctccaaatcagtgcatgtccatctctaaacccaaaaaaagaagtgatgttctgctcccagttctgccgtgtgccatgatctgctacatctctaaacccaaatacaagcacaagcagaaactacgatccatgttctgctacaagcgcagaagaagcaggaatgttctgctctcgtttctgcacgggccttgctctagtagtagattaaatcgtttgaaggaccagaagctattctattacatatccatagtttaaggaacgggagattagcttctgctgcatgcgcatgcatacttctctgatgcagattagtttctgccattttttttagttgatgctctgccaattttttagttgatgcgcatacataatcttctgctggctagtagcagaaaatcaatttgaaaagagcagaacatcaacaatttcatgtgccgccaaacagctgatgttctgcgtcctttcaaacagaatttctgctcgatcttctgctctctttccagttctattctgctcctaattggatgagcaggatatcttctgtccgcttaaattttttttcatatgagcagaatatcttctgtccgcgttttttttttccatgttctgctcctttcccgattcacattatgttctgccaacgatattttcaaaacagttatgttctgccatttttttagctgacgttctaccggtttttaaaattggtttgcatgcaaccgatgatttagaaattatttgaactaactacaagctaatattttgtgcaaatattatcggattatgggttattccactaacccgatccaataagcggagggagtaactactcccgatagtagcaaataggtgtcatatatatatatatatatatatatatatatatatatatatatatatatatatatatatatatatatatatatatatatagactttagaaatagttgaaattcagaattacaaaataaggaatattggaagaggagactaaagtccatatcgaaatacaattaagaaataatagaaattcaaaattaaaaataaggaatattagaagtagagtatagagtccatattggaatttaaaactaactaaaatttggaataaacataataaaattaaaagtagagtttagagttcgtataaaaatacaatttacaaataactaaaatttgaaatttaaaaaaacatgggaagaagaatctaaagtcaatacaggaatacaatttagaagtaactgaaattcgaaattaaaaattaaagaatattaaaagatgagtttagaatctatatagaaatacaattagaaataataaaaattcagaattaaaaaaaataatatttgaagagagcctagagcctatatagaaataaagataacgaaaatttggaattaaaaaaaaagaaatattgaaagacgagtctagagttcatataggaatataatttacaaataactaaaatttgatattaaaaataatgagtaactaacacgtatataaaatacaatatgaatattacacattagtagtttcgtaaagttagtacaaaatttaaaattatattgtcatttcaatatatttaaataatacgttgagaaaacatatatatgctattatatgagagaaaatataataatgctagccgcgcaatctgtgcgggccgctatattaaatctttaaaataagatatcggatgataatattttgataaaaatatatatatgacaaatgggccgggtcccactaacttttagcttttcccatccaagctatatccctccaaccaaacaagaaatttgatcatcctatccatacaaaccaaacaaaaaaaattggatcgccatatcgaataaaatatgtttggtcatatcccatccatacgtaaccgtgagccaaacacaccctacaatggttcatcatcctggcaccgatgcaaggtggtctccgctacaatggcagcggtcaagctctcttttcaccgagacgattggcggccaagctaagctaagctagaggcaacagcaaaagcgaattaaagcaggcagcaaaaggccgtcgtgccgtgcggtgcgagaagggctttcccttctccctcccgtcctctccccacttcaccatcatccagcgaagtggctaagtgattccctcgaaaagatagtggaagacatgaagaggttgggataatgggatcgatcgagttgagatccacgatgcatcaccagtgatccagtagggtggagcattgagccgctggaacacaagcgtccacaccaccgccagcccgaatcacccagggcgtgtgcgtaaacattttatctcagcagttggtgtgagtagtagtcctggtcttgcagatgtgctttaattttgctgagttacaacatgtttgaaggcagcttccctaggcaatgtttcagtactaggaaggttagatttggataacaacaattttttgggagaaattcctatacgtctttcggtatgctggtaagagcatactcctattcaacagcttatccaaatctgattctccaaatatttatttagccacagcttacataccgaatagagaaacaattttatttttactctaatagcttctctatttacactcttcaatctaacaatcggtcccacatgtcagtgtgtatatactttcctccctccaaaattctcttccgctttcggttgtccactagtaggacattgctgttctttccccacctccgcctcctctgcccaagccgccgccgcaaccaactgtcctgttgtcgcccaagccgtcaccgccgcaactgatcgaccgtgtaagagggtgagaagagaggtgagatggtggaagctggatgacgacgaggaggaaggggtggggtgatggtggcctagggtcacatatgttgatgactatggtggcgccggtggggccgggtggcaactacgttgttgcaccggatagggaggtggtggcaacggtcagcggctgcttgaggcaaggctcgtgggtgggggtgacggtgatgacggcgcaagggatactgccgccaaggtgtacagcggtgttggaggcctccttcttcactggtggcgacaagtgatgcaggggaggctggtggcggtgttggtgccagcatctccatttgattccaacgataggggtaggggatgatgcaagagatggtggcgacgaagatggggacgaggcaacataggagcgcgggaggaggctccggcttgccgtcctccttctcgttgtcctgccttcgagtcgacaaccagggtgacaacggggctgtcttcctcaagatgaggaagacggtggcagcaatgataagattggatacggagagatggaggaactgttgatggggaggaggcggtgggagcgaggtagctacttagaaagtgctgtcactagctgattttttttttcaaaaataatagctttttaataaaaagatataaaaataaattcctgttggatgaaataacaaatttagcacatgtcgaacaaccataattcaaactgtggtggttcgacaggtgatgttggcatgattaaaaaaacataaaagcaatcaatcctactctgaacagtagctaggatatatcgaactatcgtagttcgattggccatcatacatgcacactcttctttttttccttaattcggtgaggaggacatatcgaacttcgcaagttcgattggtcgcgtcatgcacatttatttattttatccggccaaacaagcttaggacatgtattctttatttttttaatcaaattatcaacctatcgaacaaccacataccgagaggtcacatatcaaaccgtagttcttcgatatgtgccatatcaaactttggttggtcgatatgatactaaatttatgatttctgacggtccatctccacttttacaaattcttttattaaaatactattattatctttttaaagaaaattctcactagcactgcttcgatactatggtttggccagctaaaccggctggctagatttgaccagcccacctgggtatttggccagtgagatggcttagtcatttaaatggccagtgagaccttatttttttattatgttttatattgtttggtttgaagagtgggataatcaatctgttggagttgctcaaaggttccaaacctaggtcatattgactggatagatgcggagttgaaaacaaacttgaagctactggcagacaaagctagctttctgcaaatattgtcgctagctagcactccatccatattttaatgtatgacgccgttgactttttaaccaatgtttgactactcgtcttattcaaattttttatgcaaatataaaaatacttatgtcatgtttaaagaacatttgatgataaatcaagtcacaataaaataaattataattacataaattttttgaataagacgaaatgtcgaacgtttgttaaaaagttaatggcgttatacattagggagtaataatctgctacgcggttttatcccgaattcaatcggcgacctctccacaatcattcggtatctctacatcagggaactttcgttccttaaatctgtacatgctgtcgactggataatattaacagctttctatcggaggataatgacagtgggttgtaccacttggatgatttattggaaacctgacaaatctagacaattcagtggcttaactagtacttaagaaatggcgtgacattagtctcttaggctgtgttcgggggcgggtgttgaaaacccatatcccatgcacggaaaacgaaaaacctatagatcaatatgattttttaaagcaactttcgtatttcagagggggagttgggaaagcaaagtaccgaacacagccttagtatttaagagggaatgccgtgtagtttttctataccactatatcagttttggattataaaatgttttgagatttaaataaatttatgtatggatttatatatgtgtttcatatgtatatcacatatatattagtgaatctatacgaagaatggaaatactaaaatatagaacagggagtactaaaaagcagagttatcatccttcatcactttaacaacgtacgagtatgttattagtatgagataaaggcaagcctatgaggagaaaaagaatattgtatgttactcgctccgtttcatattatatggctttatagtattgctcatatttatatagatgttaatgaatctagacacatttattaacatttatataaatgtaggtaatgctagaaagttttataatatgaaacggaagaagtaattaacaaattatacagtgcttgtgcgttgtaatggaatcttagagaaagaatgaaccagatgttcatccagaaagggtgttttttacatgaagtgtggaccgaaactttgcgcgtcgatggacaaacaaaacctattcttgtagtattattacagtagtggagatagatatttgaaccatatgaataggcaaacctattatgcatgtttataaattatctaaaactagttgacgttttcatgaaactgctcttagctatattaaaagttgctttaggccccgttgttttatgccgttagttttagcaactttctcgttatccgttagcatgtttatcaaactactaaatgatgatgtatttgatggaaaaaaagatcatttttcctccgctttggccagtatgaaagtttgcaagccctcatagtgaataatatataaagtttctaataacataatggataaatataatatataaagtttagagcaaatttcacaaaactacagaggttaaccaattatccaaaactacacatttaagatgatatattataaaactatatatttatggctaaatatcacaaaactacatatttaaaaataaaactataacaaaactacatattttagcgtttaaattcttagcactaacattgggtctgttcagctagctggtacagccactatacgcagccgttgctgctgcagctgcagacacaacgtactgtttgtgttggctacacaacagtaaagttaagtgcagccgaacatgcccattatgtttgagttataggcctccaagttttgtgattaaattaacgcaaaatatgtaattttgtgatagagcgattttaccatccaacatttggtacctcgaggtaccatattttgcacacaaaattttggtactaactaccttgagggactaaattttatttgagagataccaaattttacactaaaaagtatcttgaggtactaaaaaaatttatgataacttaaggtactaaatgttggatggtaaaattactctttatgataactctattactaaatctttaattttacaatactccaccttaaattggtagttttacgataaatttgatgttaaatctacagttttctaatatatcatcttagatctatagttctgtgatagtttgttcactatatcttttagttttttgaaatttactctgaagtttacgtgtaaataataattatgaaaatatcgtttatgttcttggtggtttaattatccagtgcattcaatttttcttaagtaccaaatgatttcaattcaccttaaatagcatcggaagttcctccgttaccttttgttttcaagcagtctgttgcaagttgtgtcagctcttctttgaacacctgtgaatctgtgatggttccaccagaagtgcggtgcggccgtggtttattgcctaaaaagcaaaaggaaataaaagtttgaagaactgaaattcattgcttgcaatgtaataaagcaagtttaacagtatagcctactagtagctccaaagcatctatagtcaatttaatagctaattcgttacctaaaatatatactctctctgtcctaaaatataacaaattttagcccttagaatttatcccaaaatataacaacttctccaccaacattctctttccaaccaatcacaactctcccaccattcatttttctcacctacctccactactcattcaatcacaacccttcaccgtttacttctacctacttttttaataaccgtatccaactctaaaatttcttaatttttgggacggagagagtattacacaagtagtacctggtttcacctgtcatacacatattacatttgtagtatgtgctacagctgactataaatttatagctcgctattcttatctcttcttatttatcttcttgatatgtgcttacggttgacttatatagtctgctatcgtacctgctaagagtgtgttcgctagaagccgttcccatttggaattttttttttcaaaaaatggattaatttgattttttatgtaactttcgtataaaaactttttgcaaaaaacacaccgtttagcagtttgaaaaacgtgtacgcggaaaacgagggagaggggttgggaaagggggcatccaaacacagcctaaggcatgatatcaagcgaagctgaggtacgcccgcccgttcaagctgtttttataccggatagggtgtgccaggtgcatgcgtacctttcgccgcgttagctacgagcctacgagcaagcgagtttccaacctctgcactgaacaaggcggaagcaaacacgccgggcgaggtgcattctgatctctcgatatttatttatgcaatttatcgcgcatgttaaccattcatcgcaaagtcgtctcatcgatcgtctgctcctgctggaaatacatctctagtgttaaattactgctatcgtattgtacttttgtgctgaaatgttcacgctttacgtttggcagataaggaaggcgctgaggccaaccatcctctggatcttttgaaaccaaaatcatcctctgaatatggctgcatttctggcgtttttgctgctgttgctgctgtcttacggagctggcagcatccgttgtgaagcaactctgaacaacacagctgatctgctctccctgatggatttcaagaagcatataacggaagatccaacgcaagcgatgagctcgtggaacgcaagcgtccccttctgccagtggaccggcgttagctgcagccggaggcaccctgggcgcgtcacggcgctgaatctcttcaaactctccctgtccggcacaatcagctcctcccttgggaacctcacgtttctcaaggcactcaacttctcttcaaaccatttctccggcaaattgcctccgctgaaccatctccacagactgaaagtcctggatcttaggcataactcactgcgtgatactattccagaggggcttgcaaactgttcgagactaagggtgttggatctctcctcgaattctcttgttggtgaaattcccaccaaattgggccttctaacgaacctctcgagcttatgtctttccaataattcattcacaggaaccatccctcccacccttggcaacattaccggcctaaactatctctctcttcaaataaaccatctcgagggaagcattccccgtgagcttgggaaattgtcagatttgttgtcattgaacatttttatgaacaacatatcaggccgacttccacatgaactgttcaatctgtcttctctacagactttatggttgagtgataacatgctagggaaagaagcactgccacccaacattggcgatgtgctccctaatctccaattcctttccttagcgaggaatatgtttgaaggtcatataccaacttcccttatcaacgcttcggggctatggttgatagacttgacaaacaacaatttctatggccaggttcctagttatctcagtgagcttgcaaatctgtccgatttgtatctagcgggtaaccatctcgaagcaagtgacaatgaaaaatggttacacgcatttgcaaattgtacccttcttcaagcactcaacctagctcgtaatcaaataaaaggagatataccaagctcgattggtaacctatccaccaatctgcaatatctgaatttgggtgtaaaccattttgtaggagtggttccaccgagtatagggaaccttcatggcctaactagtttgtggctaagtaaaaacaatcttattggcacaatcgaagaatgggtaggaaaactgaggaatctagaacttctatatctccaggagaacaatttcaccgggtcaataccatcatccatcggtgatcttactaacttgatacaattttctttgggaaagaatagcttagatggtcaaataccagccaacttaggaaatcttcggcagctagatcgtctcaactttagttacaacaatcttcatggtagtataccgtacaatgtgggaaagcttcgaaacctcgttcaactagaccttagtcacaacaatcttgatggtaacataccatccagttttataaagcttcaaaagctcaagcatttagaccttagtgacaataatttccaaggtatcataccttaagagaccggtatgtctcgtggcagctatggaaggaacgtaattccagggtgtttgactctgtgctctcttcggtctcagtggtcctagagtccatcctgtcggagggccggttgtggtcgttagcgggcgttgcttcctgatgtgaccatggctactacggatacatccgttgctcacatcatggatgaacaataagatatcaagttcgagtcctccaagtgccaaaatccaattcggccacctgctacactgctgacttcaaacgaccgccgaagctccatacgacctccgttttcagcccgtgagtacttgatggaaagctctcggagtcctctttccaatgcatcaagcctcattgccaaattccatctcagtcggcagcaactgaagaaacaaggtgctgtgacacctgtaatgggcctatgggcttgtaacctcatttgggaccccggcccaggtggggcccatgtggggtgcgccccaagctggtggagcacgaccctaggcacccctaggtcatcctcccacccctatatatagctagttaccccttcagggtttcttgggttttgtttagatgaaagtttagccattgctacttcgcttgcagcgcgcgtgtcggctagaccgtccgtctgcttgtattcgaaaccccaacttatcatttgtattaaattcctatttgcaatatcagattgcttttatcttgttcttgcttgtttcttcgatttgcttgcaggaatagggttgatctgcaccggcaagatcaacaacccacggagaggtgtatcgatcgctaaggcgcaacacaacgtctcgtacggttgtagtcggatcgtcaacgtttctcccaaatcgtagttatcacaactcaccgaaagatcgagccaacaatagccttgagtgtcgagaggaactcagggttcatcaggtggtatcagagctttcgttgctcggtgagtttttatcttcctataaccagaaaatagccatacaaaaaaattcgtatcatttacctagccatattgtgccattgcattgttcttttcagtttttgctttgttgaattttgtgttgcatcgtcatgtcgtgttgctggtcttagcgtctagttcgtttagagtttcgagttctggtcacgttttgtaccacagtcgtcgctgccaccgtgtctctgttgttgtcgggacctacgaaaacggaatcggctcgttgccaaggttctatttttgtagttttcagaagtttctgtcggttagttttggagttcttgagttgcatctagagtttgccgatccttgtgtgtgtttgttttggccgtgcctgtgtcgtgcacgagaggaggaaggtgaattaccatatctgattttggaagtagtcaagtttgttttggaaagatatagtagattggattggttaaaaatcagtttcctttttatcccatacaccaaattcggctgccatccactccacctccttgccgagtcccactcgcccctttggccgagtccgaccccctccctcaattccacggttccgagttgtgtcaaacaccttggcgaatttttgtttggtgtcggtttcgagatctgtttggaaaaacggaaccggcataaattcagcattccattttttgtataattttaattttgggtttagacttttatatttgagtccctgtaaattttatatttatgtttgagtccctgtaatcttacattaaggtccttgagtcagtttttgtttaaaaaaatcaagaaaaaagtgagaaaaaaaaaggcagaaaggtgcaaaaaaaaagagaaaaaaaaagccacacaaaaaaaaacagaaaagaaaaggaaaaaaaaagaaagaagaaagaagaaagaaagaaaagagaaaatactgttatgtttgagctaaacttcatatatcagagttgtgcatgagttgttcctagtgctatcttgtggtatcgtttgtctctagtacgttctagcctaggaccagcacggtacttgactttgaacaattattcaactttgcattatctgatttgagcatttgctattcctttgctacatatttaaccctacccagagctccacatatttgattacagcctaccgcaagtgtttgccaaggcatcgatacatccaaccttcattggggtgcttggttgagtcggtatatgtcaccattccacttgcattggtaagatcttgtaagagtttggttaaaagcttgagtgtgtgcgatttttgagctgccactacctagtagttaataggaacgcgcatatttttgtgtatgtttcttgttttctactaacaatggcagggatatgcaagataattggggatagctgtgctcaacatcgacatcttcgtcgagacatgaggagggatcaacatgaccattatgaggtaagtgatgatgttctaggtaagatcaaatctgcactgccttatttcgagggaaactatgatcctcgtgcttacattaattgggagctagcggttgatagtgaatttcaaaagcatgtcttatcggagaaacaaaaggttatgtgtgcctctagtgttttaattaaacatgcttctaatgattggaaacatctttgtaggcataacaaaataccacaatcttggaaagacctgaaacgatatttcagagatgtttatgttcccatgtattatgctgacattttgttcaacaaactacaatgtttaaaacaagataccagaactgttacttcatactatcatgatatgcaagcttgtttattacattgtggtttagatgaatgcgaagaagctaaagaattgaggtttttatgtgggcttaacaaagaaattcaggacatgcttgattgtcaaagatatacatctctttctcatttgttacaacttgcttgcaatgctgaaagtaaaatagaggaggatatgaaaaagaaacacgctatgtctttgcctccaattactaactatttgcaggaagtgcgtaatcacaaaaaggaggagagagacatgaaagagccaccaattccattgttcacactcaagttcgagacacctccatcatctaaagaggacatccaaggtaaagtaaatggtactgaaattaatcaaggtgagtgcattgttaacgaagtaaatttgtccacttttcatgcaaaagtagagcaaccgttagtggaaccaaatgctggaattcctttgtcacaagttgatttactcgctgttccttgtgataaagaagagttgtgtgataatgcttcacttatatccatgccacaactagtgaatgaacatgctattcctagtgtttctttgtgtgctgattttaagcatgctgttcatattgttaatgaagttgaggaacgtaaattgctatcttctttaaatactttgggctatgttcagtttgatgatttttgtgagctcgataatttgaaggagaaattatttgctaagtctgatttgccatgtctaactaatgctatttttcatatctttggcaaatataatgatagaggaatatatttggtgcatagagttttcatttgtttggatttagagaaacatgttattgctaatcacactatttcgagtttctctagttttgattggatgaaacaggttattttgaatggactatatgaagaacaccatatggaaaaaccgaggacggttttccgtgaagaaggggaggatgatgtgaccatggctactacggatacatccgttgctcacatcatggatgaacaacaagataccaagttcgagtcctccaagtgccaaaatccaattcggccacctgctacactgctgacttcaaacggccgccgaagctccatacgacctccgttttcagcccgtgagtacttgatggaaagctctcggagtcctctttccaatgcatcaagcctcattgccaaattccatctcagtcggtagcaactgaagaaacaaggtgctgtgacacctgtaatgggcctatgggcttgtaacctcatttgggaccctggcccaggtgaggcccatgtggggtgcgccccaagctggtggagcacgaccctaggcacccctaggtcgtcctcccacccctatatatagctagttaccccttcagggtttcttgggttttgtttagatgaaagtttagccattgctacttcgcttgcagcgcgcgtatcggctagaccgtccgtctgcttgtattcgaaaccccaacttatcatttgtattaaatttctatttgcaatatcagattgcttttatcttgttcttgcttgtttcttcgatttgcttgcaggaatagggttgatctgcaccggcaagatcaacaacccacggagaggtgtatcgatcgctaaggcgcaacacaacgtctcgtacggttgtagtcggatcgtcaacgtttctcccaaatcgtagttatcacaactcaccgaaagatcgggccaacaatagccttgagtgtcgagaggaactcaaggttcatcacttcctttggggacttgttgggagtgtagcgtggctctgccccctctcgttgtttggagtagcgttcgagtttttctttttcttttttctcttccttgtttttttgactttgtttttccccttccctggcataggccggtctggccaattgcggtgtgtaacaaaaactctattcctctaatatattgacgtgcaatcttttgtgcgttcgcgaaaaaaaatatgcatatatgtcaaggttgttttgaaggttcaataaatttcccgcggctcatctccctgttagttaaaagcaaacctcatacaagggaatgcatgtgactgtgagctgtatactgtacatcaaggtcagaatggtgaatttgatccacatttgttaacttttaattcgtgaaatttaacccaatattgaaagacacctaaacaaaaatttcttacttgccgtttgcgtaagcctattgtacttctagaacttcagtaatgctgaagaaaacgaggacccaggatgcatgtttggagctatacagggttttacatcttccagaaccacattaaaaacaaaatggtaaagccattactaaaggatcaccatatgtcagaacaaggtccacacaaaaaagaacggaaagaacacattatgataataaactgtctctcatacagagagagcatagtatgttacttcttgatcgagtgaagccgaaaaattttagcctcggaagcatgttaaccttctacttcttattcaaacccttctcagaggaaccagaatgtcgaccttgcttccattgaactatttccacctttatggccctagaaaagcaataattaacaatctgataaaattaatggttagaattttaaaagttcgactaaatttgttgaattgaactctaagttttatagaacggatgctattaatttatcaatcatgagatgatgatactaatgcaagcaaaaaatggtataataaaaccttaataaatcaatggcaaacaaggaaatatataattaccggtagggttcaatctttcgttttcggtatttgtatgggggtgccgatatggtgaattttataaacttttgaacaaatattaccaaaattcaagaaaataaaaaaattgggccaaaataatatcgtatcggagggatccgaaatttcagtctgatttgaaattggtttttctactaggggaccgaaatttcggaaattttgaaaaattttggccaaaattatttgaaattttgactgattttgaaagaatttgaataaatttttgaccaaattcagaaacttttgcaaaaaaaaaaaacctaaaatttcaggcgagatgtgaactttccggtggggagcaaaatttcggaactttcgaaacgaaatttcaaaccctagctccaatataataggtgataacaatatgtagccattactatctagacaagccacattcatcagctagtaaagaagatacagggacattttcagctgcattagaaccctcaaaccaacgacatcctgaaccatccctgatactgaaattcacaaagagaaatacgtgaatagaataaaaatcgtcagagatctgaaaaaaaaaacaaaaacacttaccactctaaacttgagctcctcggtgaggccccatcgacaattacgctggagcgaccaatgccgcatacggagcctgcactgcacggaagatgacagcaacagcaaacaaatcaaggacaagccggagcactgacaagtaacaactcagattagattagcgagggtgggagtcacagttgcgtaccgaaggcaacggcatgtgacagtgagcgcgagcgggtgcgagacggaattacggaaacaagtagcacacgcgagcttcggcgccggcgccgtggccgtcagctagcgcgactgcgcgaggctatgaggagggagaatttccggctggaattggctcggagacaaatctctccttaacaatatgggccaacgatctctcctttacaatacgggatgatttgtaatccaagagcccaagttaatacggcctctcaagtccgcggcccacatgcccacatttcaaatttctaatgggagccttgttctgggaattatttatttactagcaaaatgcccatgcgttgcattgggtgaaacataaaaaaaacaatggttttgctggctagctgtcgacagttttggaggctaaaaactttcgattttctggccgtacgatccgcgcgagatgattttctagctgtgcgattcgattttctggctgtacgatccgcgcgagatgattttctagccatgcgatccgcgcgagatttggaaaaaaaaatctgtacacgtgtgcttgcagaggctcgaacacagggtccccatcctggaagccatgcgtgctagccacttgatctgctgcatgttttggaaaagttaaatgagttacattttagttataactacattgtaactactgcactgtaactatattatacatatattattttaatacttatatatgagttacattatagctatagtgaaattatattgtaattatattatagttagatttgaaagttttctccataaaaaactttcgacagttctctagatagtcccaaaaacaatagtaatgggtgtgtaggagcaaatcgaatctttccggtgtaagtaagatgctaacatgacataattatttgttgatctaaatccattgacatgaatgattataggaaaagtattattaccactttaaaataaaattatgtattatagactaaagtttgaaacccaaaaagtatttacttttgtcatgtattattatgagttggttgcaatacatggttattttttggtacttgatattgataaacaccttttttttacatattgtaaagagtagcaataatataagaaatgtttctcgctatctatcagatcaacctcattgcactccaatcgcataatcgttttcactcaaaaaattagacggaaatcatacaatgaatagaaaaaaattggatgtaaacacgattcattctgttggtgattacatttttttaaaaaaaagacatgtgattgttttctattttctaaaaataatttattttgtcataaataattcattttgttggtgatcacatgtttttttaaaaaaaatacatgtgattttttatttttaaattaataaaattgctcgttatttttatatgattcttggtagacgtggatccaacctttttttttggtgtagtagcctcaggcaagccttctatttaagctagtgctgcccaagctaggcaaaatgtggtattatttgtgcactgacatgtgacccgtgtggggcccacttgccatgttagttaaaactggccacgatactgccgagggatcgaaattgacaaggtattgtaagttaaaggatgaggttacctggcatttttatttagggatggatttcatattcggcgataaattaagggacctcaagtgaacttattcccggttgctacagtatcgcacagtactgtactgggctgctgctttgctatgtgggctgactgctaggcttcgtttgctttttgttgggccggcctgctgctgctttagttgggctgcttgctagctttctctcttttttttcagtttctctttttatttgtggagcgtcaaaatcgccgtcacgcgtcgcgattcgcattaccggcgaaaatcgcgtgggcccatcctttaatgacggacgaaaaaattaaccggattaattaaaatatttttaaaaataaattaccgttttaaagttttgtaaaaaaatatacacctccagccctatcgtagggtggggcatatacatcgtcctaggtagacgcgggctatgtgacgtaccataaggtgggaggggtgtgctatggcaattttgtaggcggacccttctcaacctcccgtaggatgatttagttttgtgacattagcaatagtttggtgatgcatggggtgcgtcgtggtaattttacaagtgaccctttctcgcgctgtcgtgtggggctataaaattgccatggcgtgcccctcccactatatgacgtgctcatagcctgctctaccgtagggcgatttatacaccctgccctataatagattgataggacaggagaagtatatttttgcaaaacttttaaaacaatagtttatttttgtaaatctcttaaaacatagataaattccttgttctggctcttgctcgttgttaaccgcaccaacatgtactaatactcaacgttctatactacacttttcaatttctgctttctcatttttcacgtgcgcgttttcaaattgctaaacagtgtgtgtttttttaaaaaaaatctataggaaagttgttttaaaattcatattaatctatttttcaagtttttagctaatatttaattaattgtgtgttaattcgctgctctgttttgcgtgctgaggagaaagggttcccagtggccaacacaacctaaatcttgatcctactcttagactatctttttgaaaaagaagtcttgggcgtcaaggtccttgcaactcttagactatcttcttggaaaagaagttttggaggtcaaaggtcctcacagcaatggtggattagcggccaagtttgttcccttctgtacaatttcctacagagtgccaacctctattaaagaaagcagaaggtggagattctttgatccgttaacgaactgtagctttctacagatagagtataatatacagtcactagctataagtaatctgctacgcgggtctcccaaattcaatcggcgacctttccacagtcattcagtatctacattgcccaactgcatgtgctgtcacggatgatattaacagtctttatcatctgaggatggtagcaatttgggtggtacaaattggataaatttatttgaaatctggcaaacctagatacacagtaattcaaatgcctcttaatttgcaagttggtcgtatcttgttggagggaaaggttcggtggctcatcagttcttcagtccgttaatttgcaagttggccgtctcttgttccactgaaagcgtgatggcttcgtagttaaagcaagattgtcatagccaacgcctaatgctgtaaggcgtgacagcaagtcaagctggggtcagcggtcgccgtcgccggtgaagaagcacgtggacaccgtcacagtgcggcgatgaagctgtttatggccctcttttggggaagctgctccaaacagtccacagtttctgagaatatgtagttacagattctgagaaatgaactaagaagctagatttcacagcttttccagattctcagaagctggctaccaaacagctgtttcttagaatctaaagctccccaaacagaacctatatacctgatggtggctacaccgagctacgcctctttgcagcagctgcgaagcctacgagcgtgcgagtgagcttccaactcgatcactagctgccgctggtcgctgccggaataaacgccaaattaaacagcagcgaggtgatcgatcgatcctactgtgttttcctccgttttccgcgatgaaatatatgttaatgttcgtgctttacatctggcagatggtcatggaggccggccttgcctgctgtgccaaggccaaccatcgtctgcatctgcatcacagcaaggaggctacacttgtggcgtttttgctgctgctgtcttacggagttggcagcgtccattgctccacgacggtgtgcagatcgtgggaggcacgcacccctgtatgctggtgggctggcgttagatgcggccggaagaagcgccctgggcgagtcgtggatcagctggacctacagtacctgttcctgtccggcacaatcagccccttccttggcaacctcatgtttctcgaggaactcgacctttctttaagggggattttacggtactttccactactggtggtaccagtatagtatattcaaatcaaaccgttggtttgtaatgggtattttgatcctttttaaattattttggtatttttaacataacatagaaaggggtatcaaaatttcctttttgcaacgcatcgggagttcgggataaagaagatagatttgtcatctaagagcatttccaacagcatggccaaatctcactctccaaatgctcatttagctagtttgccaaaaagttagagagttaaatttgttttttactctaacagcatctctatttatcttctccaatttgacagtgggtcccacacgtattcccctctcttcctctacatgtttcctcttccccaatccccatcaacccagcagctctcacccctgctggtcgaggtgaggggcgcatggactaggagccggcggcggcttcatcatcggcgtgatgtgcccctgtgccgggaacggcaagtacacggtgtgcggcggcatctcgctcattctctgctatttttgttgcgtttggttggctagggtggatatgatcagattccgatcgatttggaattgttggtcactgcaaaaattgcgaatggagaatggaaaggtaggcaagcaacaacggcgaatttcgtgcagatcgttgacttgttccaagattttgggctgtttattcacctcaattttgggctgcagctgcggcacggggtgctcgtgttcatcctgcacgccgtgctgtagcagctgcggcggctgctgccccaagtgctcctcctgcacgacgccgtgcgtcggctgcctggcgttgctctggcagtgcctgagctgccgtcgtcatgctgcaaggggcagctgtcgtgctgcaagtgccagtcgtcgtgctgcgagggggagccttcctgctgctgctgctgctgctgcagcggtggcggcaagggatcgccggcgtactgctgcggcaggtcgtcgtgcctcggaggcgcgacgccggcaccgtcgtctggctcaggaggctcggcgggcgcgactgtcgacagcgcggaggacggcaaacgatgcgatggaggaggcagagaggagatggggaggaggaatgtgtgggacccacggttggctagtcacttttggctggccaaatttggctagcggaggaaaggttttggccagccagatggcttagccattcggttagagaggttgttggagcacgttttttttctagaatggctaaaatttaacttggagagtggaatagagaggctgttggagatgctttaacaatttcaacggccaggttcctagtcattttggtatgctttcaaatctatccaaactagatcttggggataacaatcctgaagcaagtaacgatgaaagttgaaaattcgggcgggcattcggaaattgtaccaatctgagaatgctccgcctaaatcatgatcagctaggcaatgtttgaaaaatgggtttgggatatgatttcccacccttcaaagggtaagtttcaatcttagccatccattcatttcaccatattttatcctatcccttcattcattttgatttctcaatcccacctctcctaacccattttccaaacacacccctagaggcggatataccaagctcgattggtaacttatatcactcttgagtcttgaacaactatggttggacggaaaccacctcgccggcgtagttcctcctagtataggaaactttcggggcctcgctgatgtgcagctaagtagaaacaatcttactggtagaattgaagaatggattggaatttggaaagctaactatctagaattcctgcatctccaacagaacaacttcgttgggccaatacatcctctattggctatctttcatacttgtcactgttatctctggcaaagaacagctttgaaggtcacataccaactagtttcggaagtcttcaacagttacgggacttgaacattggttacaacaatatatccccatggcagtataccattcagtatggaaaagcttcgaaacctcacttatgtggaccttagccacaataatcttggtggctacacaccatccagctttggagaccttccactgcttgggcagttggaccttagcaacaataatttccaaggtattattccttaagagatcattatgtatccagagtactactacaatttttttttgaaggtccgaaaaatttcccgtggttcatcttctctggaagctaaaagcctaaaagcaaaccttacacgaaaatgctcgtgatcatgagctgaggccccaaagtataaatcccagaacggtgaaatcagccatatttctaaaccttttttttgtgtaattagaatgatgaaataatcgttttgtaatcaatccaggacggtgaagatatctgaagattgtcaggacagctgctctgctccgctgcaggaaacagctccgggtttgcatgtttggagctatacaaggttatatcctccaaagccattcaaaagtaaacggcaaagccgttactaaaggctaatcattacggaagtataccttggaacaaggttagcataaaaaatggacaataacagtcacaaaatatggtaataaatggtctctgatataataaatatacaagaccaccgatagtaagcgtagcatgttacttctcggtcgagtgaagacgttaaaattagcctaagcagcagcttcgaccttctgtgttttattcgcacccttttcggaggaatcagaatgtcggcctcgcttcccattgaactgctttcctcctctgtagctctttccagtcctagaaaaagagcaataacatatatatgacaaggggcaaagacacattatattctgcagagaacattaaacatgggcatacgagatgatcaattttcgtgcaaggaagtatctattcgacatatatatacaaggaattaaggagcatatttgtggtaaccacaatactgcaatgcacaaataaattgcaattagcgcaggtcatctagctcgaaaattgcaaatgaaaaagtcataacattctcaaaaggcacacaaagttatttcggtctaatttgccacaaaattactgaatgctgtagtgtgcctttcctgataattgtctgcaattacttctagagataatattgtacgtagtaccaaacaggacataaacaaataaaattaaactgttaattcattgaataccttcctttgtaactcctattgtccttgtatttcccttgaatgccacgtattgtattccaataatccttctcagcttcacctgcaaaaacaaaaaaagtaagaccccacaaaccaatttaattgcatccagatttgaggaattaatttacagcgtcaaacaataataggagtcgattccacctaagtatcattaaatggaactaaaaattttctataatggatattctacatttattaatcatgatacaatgcaagcagtaatggtattaaaaaaactctaataaacacatgtcaaattgtcaattaccagtcacaggctccaaggtaacaatgtggtctttaactatcaagccaccttcatcagctaatacagcagacatgcgggctttttcagctgccttagaatcctcgaaacgaaggtatcccgattcatccccgatactgaagtccacatacttcaggaagaaaaacatgtgcaatgaaagtaaaaaacggaattaaaaagtgtcatgtgaatttgtgacatagtgacatacaatatgaacagttcaccaccacagccatgccaggtaccaaagatatagataattaacattatgtcataccactacctcataactgtgctcctccaaggaccataaataaacttttacaaatatgaatttacaattaggactagctattagtctattaccacgattttatggtgtgtatcaagaacattttcaggcatttcccattccatagttaattgatcttaataattttacaactcgtcatgcttaatatcccaccagatctttaaggacaaatgaaagtacaaagataatgccatatgacccatgagttaaaatctgagctctctgtggaccatatttgaatctagaagaatgctatatgtttcataattttcattccataatgttaaacagaactgttactggtgtttataccaagaaaaactaaagctagaaagtggtgtggattaaaatacccgaactgttccaaattttttgaacgcttcttttagatcttcccttgagattggactattcgctttgccagagaggcctctgtcatctttgatcgatgtttcattatcacccttcttttcactttctagcaaggcatcaactgtgcacttgtcaccagattctgtagcttccccagcattcacttctttcgcttcagtcatgtcgtctgatgacttctgttcctccatatcactgttcacggtagtcctctcttcagattccccagttgatgttttcttcatggactttggagtttcttcttcagtggcagtatcattgtctgcacagttttgttgcaccccaccatcaaccgtgattctcttcaatttgaaggccacaattaggcctttaggatagctgcaacacaaattccaggaaaatggtcttgatttgaactctaaaggaaggaaaagtaattgaacagacagcctgtaaaaatgtcacccttcattctgctcgtccttcttaggatgtgccttttcatatgcttcttttttagattctgtttcagcatcaaattccttccttcatgattcaggcaacgaattataagttacataatgtcacatacagcaacagaatgaacgcaaatatgtgaaaggcatcattaattcaagtatcactaaaagaggtaaacatgcaagacaaggaacttgctagagggaaatgcttgcatgatctgacaccaaactaaacaaaagaagtacaaaattaatgcagcttatttcgcacatttcattcaaattgcacttaatagaaaagaaagcaatgttggcaatgaaatgaggtttgataactaacaacttaccggtatggcagtacagctagaggggaatatattggaattaacatagaaatttatggtgatagtactaaagcaagcattttatctgcacattccacatgtatgattatcatgcaaaaaggatatgttagtggcttactttagttttatttccagatttgcccctgcaaagaacaaattattctccaaaacaattttcgcttcatcctcttctgaaaattcaactaaggcagtgccacagaagtgttttttgtttgagatatggcgtggtagcctgacactatttacctacaattcagacacaagtacaccaagaaaatgttaattcattgatatttgcagtatagtattgcacatgtaatcataacactggaaaagctccagatagccagcatgcataactggtaattatgttcatgatactcaaaatcctaattatgaaaaaggttcacgagaaaaaaaacttcctttgttctgttgaactttgaatcgaatttatgcagcctagccatgccaccttttctctttgcattacatttcaatttcatttcaaactaactgcaagcttgttgtgcactataagtgttcagtacttggacacacctttgcatattgcgcaaagaaagattggacatcttccagctttacattgtaaggcaatggtgacgcagcaactgtccttgagtccacttgcttgatgatttcatctgccttcaacagctcactagctcgaccaaccatttttcctgcatttgaaaaatacagcaaatcagcaatgataaaaaagaaaccaatttactagagaaacttaactcacataaaagtagaccagctctagttcccaaactaacactgtatttgagaacatggcatatttatcattactaaagaaggaaaacaaaagtttattgacaacattgaatagcaggtcacaaagcagagtatatgtacactttacatcgttatctaaaaatgtacacttcacatgtttcactggtatttaccaactccttttgaaattcaattgccagcaatttgtgctcgttgctagtgaatcacgaataactggaattaagaggaaagagaggaatcaccatcctccgagatacgaagcatctgggaacgacgtagcacctctgctactgcgagcactgtctcctctggcacagtttcgggcttcacggcggcgtccagcccgaggtgcgacttcatccgcgcgaaagagcatatcaaagccaagcttaccactgcacatttccaacaaaatgagaagaaaaaaaaaagacgctaagttcagcactcaatcatcgcgccggagaaaagcaatccgcgtggaaaatgtactgcgcgagagatcatttacatccatcttcgcgctgctcgaccgtctccctcaggaacttatcgcgcgggaggttgctgtcgctgaagtagaactccacctgcgacaaccaaaccaaatcaaaagctcaaacctcccccccaaaaataaatgctcaaacaaaatcgccaaaagggggagaaatccgccgtgaacaaacaacaagaaggcgggatcggacacctggcggagaacgctcttcgccttggcctcgtcgatcgacggcgccgcggtggcggcggccatgaccccgatcgcgatcgagctggtgtggagaggagaggagaggaatcggcggctttagggtttgggtttaggagcagcgcgcgtactgtgcagcgtgccgacgaggaagacggacggagagtggccgaacctttcgaggagcatctgctgggccccgcccaaaggcccaaacactatcctccgctacattatacgaggcccaatcaccgattgggctaacctttctaagttgggccggacccaatctccatactaggctcagcctcgcggtccatggcttcaggtcgagatgaggacttgttttgggagttacaggcagtcgtagccgtagcttctttgagaatcaaactctctcaaacagtctagttcttcatctaattttttgaaaagttgtaattacaaaatacacaaaataagttaaaatccagaagttaattcttccagtttttttaaattctcgtaaaccaaccaactgctttttaagatcttaaactttctcacttggctgtccaacgtcgacgcgtcggcgtcggcgatccgatagagacgccattctcctcgtcctcctccgcacttgcgtgcaggggttctctcctcttctcctctcctctctctcccgttgcgatctgcaagctgcggtgtaatcttatccggattttctaccggaaacggccgcatttccctctcgaggccgaaaacgatgtggaatatccctttccatgttgcccaaatacagtagcaaagctagtacttagaattctgttatctttagagtgacttgtcacactctgtccgtttgatttgtcctcctctcatggcagcagcaaatggtcaattagtcgaagtagtactatccaacatgttcacggcctttcttctccgagagtgactgtcggctgtcgagtagtgtgtgatgaactgaaaccgttcctttttgggatggccgctgaataaaccgaaacggagaaactgtgggcagctctgaattaagcctcaaccttgtggctcaaagaagtcccaaaccgtgtgtaccaagcaccacaaaattggtttcgattttgggatgctgagaagaatcccacgtataatcatggagaaatgttcaggttttttaccttttgctttgccccccaggttctgcatggaaattattaaattgaagaaatgagtgccaagcgtccagcagctgtgaaatgctttggattcccttttgccaacttcttgtacatgtgatcaatcagtttgctaaaatagaggtagacctcggttggtgtttcatgggcacatgtaatctttgtgttttgagactgcaacaatcgtggggatcatagatatgtgagctcagttgatgttgaaaatttggtcataattcggcatattttaatccaaaataacaagataataaacatgatatttacaatgggatttgatttggtgatagtggtgaatgtaatcaacatgagcatgcttaatgtagaataaccatcaacaatcatataataacacaatgttgacattgcgatgaatattaacagtaaaacttctaattgaaataatgtaagaaggttataccctaagaatggtcatccgctggagtttgaggcagtattgcctccgttggtgttgacgggagcctccttctccttgtatccagtgttgccgttgtctccagtgtttgacatattggtgaaggtgaagtagatgttgacgaacagtgagtagtcgcgccttgcgctcccaaaaacctgatcgcacgcccgtccgtacaaacgtcgcagcaacgcgtggtttcggaggcctactctcccaacgcgtgtgcacacactcgtcgggatgggattactgtagcagcaacagcgttgaaaatggatgaaagtgtgtctctcttctcttttaggagatcaaatccattctcattttatatgaggaatggaagatgaagagtaaaaatcatggaataggaagaggaatatagtaactaattctcatcaattagccatgaaccatcctccactacacaaccatcaaccaaccatcaattaggagtaattgatgtaggttaccaatggaataggaagaggaatagagcaattaattgtcatcaactagccatgaaccatcctccactatacaaccatcaaccatccatcaaataggagtaattgatataagttaccaattccctaatcaaatggattaattctcaaaactcctcatcccattgatatcccataagagaatgaatacacatgaattcctagcataatgaggcttggaatttatttgatttaattgatttaaatggatcaattacccaattaaatctaacagttgagaagcagactcttgactgttgagatgcatgcaaggctactccaagccaattaggctgacgcctaactttgccagaagtaagatgatgccatacaaagtgaggtagacaccttattaactgtagtacaggtttaacaatgtttgcctagaaattgagtacacatgtgatccgaatgtgtgaattaacaaagtgtgactctccacgatcgcaacaacaaccaaccaaatataagtagtaactaactaacccagtaaactatgacacgcctaacatttgggtgtggcaatttgtggccttcatgtaaacattccctttaggatatttcttaagaatgttgaataagatagtctattatagaacaataaaatgtagccaattgtctaacagcccatataaaagagccaaacttcattaatatgaccttttcgattatacggaaaagacacatgcggacaccaccaagtgtgtgcccctgggtgcatgcttaagaaactgacacttaaataaaatccatgagcctcacaaaatgtttattttaatcctaataaaagtgttaaacttcaataatacttgccgtatttgtcattgaggctcgtttggtagatttcccagtaatttttagggaaaaatactgtaggaagactcctataacaaatatattaacaatttacaatgtacagggcgagattacgagttttgtagccattgaataatatgaggggaaaaaactctcttttccccagtatttcattattgacatgtattttgttgtttatgccttttaagtggctaggcttcctcctcacacacactgggttgcttcaaaagctcaacctctcacacaagatgccattgacgaccaaatcctaccgaggacttggttgcagtggattagatcatagtcacttcaagtgccggaaatgctgaactcaccaattcgtatagaccccaaacaagtagcgaccctatattccaatacgcacaccaaagtctaattacaagttgcacaagtataacagtactccatatacactctacgcaagttgcagacgggtttgtttggattgttaccaattttgcccaatcaatattttggtagcgctaaaatcttggtaatttttgacactaacaaattgatagtatagtacttttagcagcgtggatataaattggtagcaaaccaaacatctatatgttgggttggtttggtttgtggcctaaatagaccttatcaaattttgtcaatgccaaattttgttaagttttggcatgactaattttggtaaggcaaagttgtgtttggattaaagccaaaatagcctaagttcactattgaaatggcttattttcttactcatgccaatttggctttaaaccaaatagacactaaacactatttaaattaccaaatattggtatggctaatttaggcctcaaaccaaaacagcccgttactattgaagttgccaaaaaaaattggtaggacaaaaatcaacctcaatccaaacatgcctaacatgtctagtactccttctattttaaaataaacgagtctagtaatgtagcatgtctctctagattcatagcccttgaatacatcatatttcatactaagcttatttattttagcacctaaatatatcatattttatactagtctgtttattttagaatggaagggagacgcaaacacatgtccactagccttggtgtgcggtgccaactggccaccagcagcaggcagcagcccagctcagtgctgccgccgcaagtgtccagcgtccagcacgcaccaagccctacgtgaaggatccagatctcgcacgagatttgccgcgtccccactccccccacccacggtggcctcggcttggccgtggccgctgacatggcatcacctcatccgcaaagcgataagccgggagcgcaccagccaaccggcgcgcgacacctggcgcgagaggcgacggtgacagtcggacgggtgggcccctccctctgtccccgttgtccccgtgcgtcgcaggcgcgcgcgtcgcgacaatggtggcgcaaccaccgctctcctttcttttttttttccttctcttcccgcagaggaaaaggacgtgcaagtgtgaacggcatctggctagatgtactacagtcctagagagctcgtgcccatcgcgatgtacaaagtctttttctttcttggcttttttgcgtgcttctgtgctagtagtagcaggaaaagcagagagatgggttcatggtggccatgttgcgtagcaagtgatttgatccgattccgtgccgcctaaaaaccgttggttaaactatgggtctcatacacatcgcgatcaaaacgaatgcaagagcgtaaaggtatactcggataagcgctgaaaatgcagtagtactggcagtgccgttttgcaagcagcgcgagatggcgaccctctgctgctgcgacggcgatttgccggctcggccaatgcggagccgtcagctctccgctgctcggctaaacaccgggcaatgtgagcgagagtacgcgcgagacgcgagccgacggggggagggagagtgaccgcgcgggtcggacggtcggtcggaccacactcgcgcgcgcgtctcgtggccgggagtccctccacgtgccacggaccccctcaaaaccccccgcgaatagtcgaatcccccgtgcccaacgcccaaaaaacacagccaaactccgcgagaaaccgagctgcgagcgagtgaaacgcaccacgcgccgagcggcaaagcgaagcgaagaagaaatggaggcggtggaggacaaggcgatggtgggagtgggaggagcggtggcggcggggtactcctcgtcgtcgtgggggttggggacgcgggcgtgcgactcgtgcggcggggaggcggcgcggctctactgccgcgcggacggggcgttcctgtgcgcccggtgcgacgcgcgggcgcacggcgccgggtcgcgccacgcgcgggtgtggctgtgcgaggtgtgcgagcacgcgcccgccgccgtcacgtgccgggcggacgccgcggcgctgtgcgccgcctgcgacgccgacatccactcggcgaacccgctcgcgcgcaggcacgagcgcctccccgtcgcgcccttcttcggcccgctcgccgacgcgccgcagcccttccccttctcccaggccgccgcggatgccgccgcggcgcgggaggaggatgcggatgatgaccggagcaacgaggccgaggcggcgtcgtggcttctccccgagcccgacgacaatagccacgaggatagcgccgcagccgccgacgcgttcttcgccgacaccggcgcgtacctcggcgtcgacctggacttcgcccggtccatggacggaatcaaggccatcggggtaccggtcgcgccgcccgagctggacctcaccgccggcagccttttctaccccgaacactccatggcccacagcgtaagcctcactaccacacagctagctctcgtcgatgctcatggcgcggcgttatgacatggtttcctacgcgttccgcagttgtcgtcgtcggaggtcgcgatcgtaccggacgcgctgtcggcgggctcggcggcgccgcccatggtggtggtggtggcgagcaaggggaaggagagggaggcgcggctgatgcggtacagggagaagcgcaagaaccggcggttcgacaagaccatccggtacgcgtcccgcaaggcgtacgccgagacgcggccgcgcatcaagggccggttcgccaagcgcaccgccgacgccgacgacgacgacgaggcgccatgctcgccggcgttctccgccctcgccgcgtcggacggcgtcgtgccgtcgttctgaggaaggacgtacgcacggtacggcgagtcggcgacgtgcgccgtcgtaattttggcgcgccccgtgcgcgcgtgcatgcgtgcgtgtgtgcgacgcatggccccgtgtgacatgaataatatgtacagtagtttttcatccatggacgtagtattctattgtactccttgtactcctactactcctcttctgcctaaccaaggcttgtacattaccatgggagtagctgtttttgcaaccgtgaccatggttcagtgcttcaagttcaagggcgttaatgttactgtccattctacttttggaaaggctagtactcctcctacttgctactagaagcttgccgaaaaatggtaaagaaaaatgtgcaagaacgaactgcagtactcatatctccatcaaccaggaggttcgagcatcatactactctattatacgagtgtaatcatcaaccaataactcccctaacctcacagtttttctcctgattttggtttttttttggatatctgactgttttacacgtctccttttactgttctgtgcacctcggcctaatttgcatgcttatgcgttgccggtgcgccggttgattacgtaattattcatgtatttggggtttggatgccggtcattgtgacggttgtttccggttggctggtgcgttgagtgccgcgtgccatgctgccattttttgttttgatctaattgtttcttctgttatttcagatcggtctatccgttctgtattctgtgtctttgtgactttttgtttaggtccttggtatttttgaaaattgaatgtgaagaagacaaaattctgtttttgggtgtgtttgtggtttgttcttctgctgggtatggaggtgcgattttccccacctgccgtcctccctgctggtcacaccaaatgcctcatgctccgccgccatcgcgcatcttcgtgctctccggtgagagcgacatgggcggccgcggtggcgtccaccaccggcgctgggatggcgtcgtgccgacctagtggtacatattcaaagcaccctttacacagctttccgttcgtgctagtttctgttacgtcttttatttacctgtgaggtgaaaccgtgcaacaacttccgtattgggggacacggacatgtactgaaccacgtaaaaagggttggaatcattgaagccttttctgttgcagatgccatggaagtttgatggctgcagccgcgtagtgcaaccatgtgacctcggtactagcgtacaccgctttggcacaaagccatgtgaagcgccgtatcggtgtgcccgtgccgggtgtgggggtggtacacatgtagcgcatgtgatcatggcaatggtgacgcgatgcatgatacagtgaatgttgtaggagtatatgtgagctgctccagaagagctgtgaacctggaaagtggcgcagcacggtgaccacagcgcatccagatgcagtggagacatccagaagcatgtgtaatcctctgatattacggcatccgcaacaagcaaaaagagcagcacctacaaaagacattaattaataatactagtatttagcacaaatattccagcaatgtgaaaaatctaatggtacaaaacttagtcttacggactacatggggtctcaaagtcatacagtcgaccaaaacgctaggctcctgcttcaacaattgtatcagcagcggcggggtttttcccgaagggtacacaaatgcttccgaagaacatactcaatccctatagcttttcaagactccataacacaagcgcttacaaaaacacaccgagcccccctaacatttccagcaaattggaactaggcgggttacgcgttatttgcgtagggggactcctcgcggttggctggctgtgctggtgatctgctgtagcttcgctcacgaggaggtggaggtgatcggctgtagcttcgtgcacgagctggtggtggcgacctgctgtagctgcgcctctttggagaacgatcccgtgggctgtaactcctaaaacaaagaaaggttttaaaaacaaacaaacttgcggttatcacagaaaatagttgcttaagggcatgtatgtggcaacacaacaacagtagcatgatattccgcttcaagtaaaatgagacaatctcaactacaaaatccttcaaccgagttgttaccatgtttgccttaatctactgtcatcttatctgtatgatcaatccacaatatgctataatgcagtaacaaataacaaactaaaaaaaataaacactagttatcttaatagttattagtgatcatggtaacagtatatgcatcttagtaacatagccctgaatttgaaattgaacccaaatgtaagtgcggacaaagctgatcagtgccattgagcaaatattttagtgagggagaaagttacaagtttattggaatacttatatatcttgtacttcaagcttcttatgtaagcacaccttttagtttctccattttcacaatcttgaatatggggtagcgcagctatataagttggtatataaaactgcaaatgtaacaacgatttggctggccaacaagaaagaatctagggatgccaagatatcattttgtcattactcatatctacagagcctgtttgaagacaataactttacattaccttctaccatagcttgggctcctccggtatcttgggctgcggctgcgactacgaccgcggtaccttggactccggctacggctgcggctgcggcgtcttccactgccaaggcctccagaaccaatccgtaagcggcattcacgtgcaaaatgaccaggttcgccacattcatagcacttcatgtcagaaccaccggaacgatctcggccacgaccactaccagctttggttgacagctcaaccctccatccattcttgcctataagcacatcacatatcagcaggatgattgtaagcggaattcatggactgtttaaatttgtgagtaaccctataataatatgttaagtaatagctaaagcatagaagtaggttggaaaaatacaacacatcaattgaaagggtaaaagaatatcttggtcaagtaacaaatcatatgatgatatcacaattttaatgtacaaagctacatgcacaactgaagtcacagagaaaaaagaaagtaggcatgtaccaatatctatcaagtttcttaacttggaacaacatgggcctaatgtgcttgcaacaatatatgtatatcacaatatatcagatcaatataaatgtagagtgtcaaattttgacctcgatttactaatatcaccactctagaaataaataacaaggcccggttaggttaaaagacggacctcttagttgatatcatgtaaaggttcaatttagaattctactagtgaacaggaattgagattcagaatttatgaaactatggatttgcccctgtctattattttcaaaacgtccttctaagaccgaacagtttacaggagatagcaagatgcattcatgatggtaagctaaaactatatgtttggacacaacatattttatctataaattcagtgtctattgtttatccaaattaaatttataagttgcttgaatcatgattcagacagagttatttatactataaccaagataaaaattgatggggactcacttgactaaagaaataatgtaatagccattttaatggcaaaactatgtaatgccagaagttgaaatagataactcattagagaagtgcataacatgaaactatcttgcatgaactacaaagacaaatatctacgcttattaccatctaaatcacgaattgcatcttctgcatccctgcggtcatcaaagtcaataaaggcaaaacctggtggttttctagcaacccatacactgcatagaagaaacaactcagttgaaagtggaagaatcagataatctcatttgcagacataattaagaaatcattactgctccatatagactatgaattcattaccattcttagtattgagtaacaacctaaatatctcttccatggttgtcgatacaaaaatcatctttaatgttgtgacagaaatcagcaataaagaaactaatacacacacacacacaaagaaaaacctatggcatacaaaccatgactactccatgtgaacatcaacagccttcaacataaccctttggcatgcagatacaaacatgccactgagtggttcaactaatgagtaagtgataaactctttagaccagcagacaagaaattcagaatattgagatatcgccagtctattaagaaaggaattcaggcgtacactgacagaccaagagataacatgactttatttcatatacttcacagttaacgctgcgtcacattgttaaacatcataactttacttgatctgcctcttcatatcttattgttcactgcaaactcaattactcttcaagttcacctgatactttctagcatatacgttgcatcccacagtatgaggcatgacatacaaaccagaccgatcctaatactcaaattagatatattttcccaatcccaccagtagaacagagcacttaggtgcccaacaataagtgaccaagtaaggcagattacttgtttatataaaaaggaattaattatatccagcaaaattgcattgcaccgagctctccacctcacatatgtcaatgaactaattttaccccaataaaagcacagtacaagacaatcatcccctgctatcattactaatttgagagctaatacccaccatttaaaacttaaattgtaaagctgcagcattccaatttcaaaatcacacgcttgactaacatccatacaagtggctaagcaagtcaaacgaacaagcaggcacattaaacaagtatacgcaacacagggagtaaaatatatatatatagtgattcttagctcagagtcagcagaatctcacacctcctcagaaccccaaacacgcggaactcgtcctcgatctcccgcgccgtcacgcgcggatccaggttccccacgtacacgcgagccatgagcgcgctcgaccctgcaggtattcaacacaaatcactcccaccacgctgaggaaagcaacaagcaccaccaccaatctctaccaaaccaaaagtagaagaacacaatcacacacacacaaaaaaaaaaagaggaagtaaatccggaaattcctcgcgtttccgaccggaaaaggggggcgcaaaagcagaagcagcgggggatctggagagtacttgcctttgcgggcgcgtccgccttgggggggatttgggtttcggggtaggcgaggaggaggaggaggagcggctctagggttttaagctcgagccgtcgagcgagcggaagaggaggggcggaggggcaggggggagtgtaatatcaggcggagggggttgacggattggggacaggggcatttacgggattcgagttaaaatttttgtctctgtttggattacaacgggttcccctgcccggtgggtcccggaccagccgtaaaccattctccctcagcatttgaattttgtctaaattttatctaagaatataagaatttttatgttcgtttcttattttaaaaatattaacacatgattaattaagttttaattactataaacttaaagaaagatttatctcaacttctatataaaaattttcgtacaaaatacaccgtttagcagtttgaaaaacgtgctaatgaataaagtctttatcttgatataaatataaaaaaggcggggcctaataattatcacatcaattatttcttatttaaatttctttatatcttatctctaatcccctccactccaaccttatttaattttctttctatcttatccccaatctcgttcacctcaaccgatcgggatttatactataggctatagcaaaccatattattttatacatcttttagcagcaaaatatggaccaccaaatcaaaaatatgtatgacttccaaatcgtacatgatctcaatctacccacgataatctcttattaaatgaggagcattaaagtcttttcttctccaacttttaactaaacaactaaatgttggatgtttggagtacatacttaatgcagttctccggtgctcgagaagggatgaagtggtggtgtagcatggcgacgaggccagggcaaaacgaggacgtcaagcgctgtgttcgctcgggcgtcgcgccatcgccttgtgcggtcggggttaagtagagttcgcgcttgtaggatgtcataaagaacctgaaccatcatagaagatagatattgggaagccaaaataagatgatgaggaagaaatgggtaaggagagagagatgttgcggctattcagtgggaaaacaacatagactatgacacatgtgtgaaaaatataataggagtatagcggttttcatcgctcgctggttagctatcatcttcagccaaatttaaatttcaaaactggactttagagttagttttatttttcttattgtactccactttccaacattagctttcaaatagctaataataaatatataaaagttttactcatatatttatttttgttgtttcttcttttttttttacagcttaccaaccgatcaaagccaactagaggataaacaaaactttacatccacaataccaaaatccatgccgaatcagtgacaagagaagccaaatttatgcttgagctgccaaaattatagtgtcgacttcgagcaacattattacaactttcactacttctcccagacttcatagcaaataaacataaccttccagctccgattcaaagccacttattcttttttagggcattcaaagccatttctccattccaagctcgaaggtttagatacaaaagaacagaaaataaagaaaataaagaaaaagcttgtgatttatatcttgtcatatacttcctccgtttcacaatgtaagactttctagcattgcccatattcatatagatactaatgaatctatatatatattaatgtctagattctttagcatctatatgaatgtggacaatcctagaaagtcttacattgtgaaacggagggagtatgaatgatcaattgaactactcttcagttgctttacactgtcataataagctgttgagtacatggaaaagaatatgaatacaaagcattgatttttttttttgcgggagaatacaatgttttaacttgatacaccgtgtatgaattttcaggacaggcgccagatcaatacaattaattggatcactagcctgcaaatctgcatgtcattgcaaatatggacaggattaaccataaacaaattggttggatccagcaaatgagattcagacaaaagctttcctggttgaggaagttaaaagcaaaaaaaggaactcatgaatcatgatctgctattgcccgaataaactagacaaagccgtgagatatccagccagctgcaggaatgaaagtgcagatgattataaatgtgctgtactttatggtagataggtaacaatggtatattttttacagtatcatagctattcgttgtgggctctgattactaagatggtatgccttctttatattcagatgaaatacctgtgccaagataccctttcctgtctgaccttccagtaccaatcctacagtcagtcctatcattgccaatgcaccattaatagcttctgctcgacgacgtctctgcgtagcaggcaactatgatatggcataatgttgaaaggatgttcataaagcattagcaccaacatagagcattttgattttaatcagagaggaatacaaacaggcgagttctccagcaggaaacatggagtaatctacggtaatgactgaggaaactatttctggtttacatagatgtgtttttaggtgcagtacttattttctccctgataaggattttacagactagccatgatagcttttatgcatggtcatggaatgccatgacaagcaactgaataatcgaaaataaatttgagcaaagaaaccttgcagatttcaaaagcaactttcgtccacatgaacatcatcacagttaaagcttcctcaataattagtttaggataactgaattatgcaacacagaacacactgccacattttgatcaataaacagtagaagataaagatctggtccagcaaaaagtagatagggcagcacaagtcagtaaaaaggctaagagccttatatgactagggaaaagtcaatcactgcttccagctctaagaaagaaatttgctgataagtgtttataaaactgggggtgttgttattaattttggtttagaaaacaacaagaatattttgaactttagaggagacaggtctggtgggaactgtggaagtacatgacaaatatcaaatactgcaccttcagcttttctctggcctgaatttgttgcatttgttgagctgctaagcgcttagcttccagtggatcaaccattaccacattatcacctgaacttcttttgccttctgatgcctgattcatttgaactcagtgtcttagataccaaacgataatgacaaagttttgactaaagcaaaagaacattgtatattagtttcaaaagaagtattgaatccatttttagaggcaaaataatatctactctatagctaaaaataatgaatctctttctgcagaaattcttgagggatacagcacctgctcaagatccactactaaatatcatgctcctacaaaaacacttgaagttaccaataccatattcaataaattttgtaattttacattctgtagacctaccaaaccaaaagtacttttgaacccccaaaaatgaaatgatctacacagaaagcctgaatcatacatctgtgctagcaaaagccaagaagctttgcacatgggtccttcgatagaatgtatgtcctggctgcttgtattggacagtccatctaagcaaggaaaaaacatataattgggcatcagttaactcggtggaaatactacagatgataaactgaagcaaagaaatagccgttggcacataatagtaattccaatagtagtttgatcactcccaacccaaaaggtgaaggtgaattgtttaacactctagaaaaacgagtagtattcttctgctaccaaaagtaattgtgggtagtgccagacattatctctctttttttttcttctttttttttgggaaaatgagggctagtgctgtgccagactgatccagtgaagtgagccagcgacgatggccaccaaattcatcacaatgaaaagttctaaactagtcgtaccaaatatcatcaatatatggaacagctgatgctaaattcactcgaattgcagagcagttggaacaaaccaacaactgacagcgaatgattttcttgtgtactaaccaccacaacaatctccccaacttactggacaaacgaacgtagcatcacggagcacctttaccttcgaaccatgaattatgcatcggaaaaaaaaaagagatagaaatgggtggccaagaacacgagcaagaaggcaagcgcggatcaatggggacaccatatgaaagaaacgcttgcctggacgtggacggagccgaggacacatgccccgtggagaggaacggagacgaagaggaagcagcagcagatggaggaggaggagtagccgacgccgagaggaacacacgcggagagcacgccattcttgcttcccaccaccgcctctctctcctcccctctttctatggactcgagaagccgtcgtcttccacctctagtttttctctcctctttcttcattttttttttctcctcggtgtcgtggttatccaagtcgccgtggtcgtttgggcctacgtgggcttaggccggcccacgaaaaaaatacttggaagaaaagatctcctcgcgtgagccgacgccgcgagcgaagcccgcggcgacaccaccacccaccaacgttagcttctgcgtgtggccgtgggcgcgcgctccgcccgcgccatgacgaccgccaccgccatcgtcgccggccacggcctcgcgctgcgccggagcctgcacctctccaagcccagctgcgccaccttctccgcgcgcgcgcttccgcccgccgcccattgctgccgcaccgtcgtcgccgcggccgcgccgtcgtcgcggacatgccggtgccggtccgtctcctccgagagctccaccgccgccgcggccgacaccgccgacgacgaggaggaggtgaccaagagcgactcggaggaggaggagatggacccgctggcggaggtgtgctacctggacccggaggcggacgcggaggggatccgggagtgggagctggacttctgctcgcgcccaatcctggacgcgcgcgggaagaaggtgtgggagctggtggtgtgcgacgcgacgctgtccctccagttcacccgcttcttccccaacacctccatcaacagcgtcaccctccgcgacgcgctcgcctccgtcgccacctccctcggcgtgcccctccccgaccgcgcccgcttcttccgctcccagatgcagaccatcatctcccgcgcctgcaacgagctcggcgtcaaggccgtccccagccgccgctgcgtctccctcctcctctggctggaggagcgctacgagacggtgtacagccgccacccgggcttccagtccggcaccaagccgctgctcaccctcgacaaccccttccccaccagcttgccggagaatctcttcggcgacaagtgggcgttcgtgcagctccccttctccggtcagtgcagtattggcaaattcgctgatccattaattccatcaaaaaattggtgctgttttgtgtgcttgctagtgtgatccacatgttctcttgttgcgatcgagctgattgttttcagattgttgtgtgattgttcagctgtgagggaggaggtggagtcgctggagaggaggtatgcgtttggggcggggctcgacttggacctcctggggttcgagctcgatgagaacaccttgatacctggggttgccgtggaatcttcgcgagccaagcctctagctggtacgtttctcccatgaccaatgagatgtgtagtgtggtctaggggctaaattgaatgtcaagtgtatgatggatctttactttactgaaacctgaattcagcaagtgcaagttaatttgatgttgcagcacgctactcaaaattgaggatgcgtagggtatcttccgagttaatttttttgtacaatcatagttcatggttgtttacttgtgtatcgaaaaatgacactagtgtaagaatcatgttttcaactttggaaaaataaaatgaatgacagcttacaagaatcaaatgaatggctagtgcatatatgtttatgttatctttattagcgtattcagtatgatattccattctcctcattgttgctgctttttatggtagattgatccacgagattgtaggaattggggattgtatgaccaactgtctgcagtttaatttctgaaagtatcttccaaaagaaaaaaaaaatcatatcgagtacattctcgtgacagttaaataggttcattgtattcaagttgtccgtttgattctgtcatgtttgattgaccattctatattttcaagactggtgttaggactcaaagaggcttaatcagaaacatgtgttcttcaatccttgcagcttggatgaacggtctagagatctgctcaatggaggttgacacgggcagggcgaacctgatcctatcggcgggggtctcgaccaggtacgtctacgccgggtaccagaagagcgccgcgacgacgcaggaagccgaggcctgggaggcggcgaagaaggcctgtggcggcctgcacttcctggccatccaggagaacctcaactccgacgggtgcgttggtttctggctcctgctggaccttcccccgccgcctgtatgattgatcctgcagtccggagagtagcatctagcagcgtgtgtttccatcaaagatcactgtgtagtatgtgtagctccagtaacaaaattttcaatacaagatcccttccatctgtactacacactggtgtactaaggaggaaaaaaagaaaagaagaggagataagggctctgtgtgttttcatgtgagatatgagtttcttaagaaaaaaaaaggaataagttcacttagtccctcatgttatcattgagtttgaagcgcgttcttaaatggcaataccagatataacatgttcctcatcttataagaccggtgtaaatctaatactaaggcagtattggagacggttttggctaaggcggcaccaggaaaaaaaaacatgtggaacccacactggcatctccttcattcctatctctctatctccctttgttggttgcgactacgagagggacgaggaggaggaggtgaacgagaagcaccggcatgggagggtgcagcgggaggatgggcacaacgggaaggatggagagaagtgccacgaggagaagcggcaggagcgaggttgggcggagtggggggggagcagaggaggccaggtgaaagagcaatagtgggaggccggggggaggagcggcgggagcaaggccacaatgacactggttctgcttgtccatccgcaagtctaggcttggcggcggcattggtagcaatggcaatgtggtgtcctatgcaccaccacgagaggagggaggcgtgaatcaactccccgacatcttccttgtcaaaggttgcactggcaggaataagcacaatagtgtcagcacagtggcggcgagcaagtccagctactccacggacagggccaccccaatgacggtgaggtagcagcgcgccatgtcgccccggtgctccacgaagatctagcgcagaaagacgtggactctcgttgtgaggtcctgtaggcgtctacatctctacgcagcccgacggtggtggcggtggcctagatagtagggttgtggtggtccatggacgcccgccgcgcgcggaggtggtgagtggagtcgagaagacgaatcaacgctgttttgtgtggtggtgtgtggcgcgctttggcagagcagcgtcttggacgcctcgtgcacggattggaggtgcatcacaactcgttgcgcattgcgtcagctccctcgtctctttcctcttctcttcttctaccatagaccaccggtgcccccttgtcgccaatctcctgttgctgctaccacctcctgctaatgggctcatcagctgccgcccctctccccgccggtgagcttctgcggaggaaatgggagaagtggaagagagaggaaaggtggaaggcacttacatgcgggacctgtattttttttttgtgaataggatgccacgttatccaaaacaatcatttgtactgctttaggacctggttttgaaatatgaaagtttaacgtttctggttttatggtttgaggatgtaatttgaactcgacattacacaaggtacctaatgggaacttcttccaagaaaattcaaggtttgttacagtagtttcgtgggcttcccctctagtggctcttaagatcagcaacgtgcctactctgccagtccctctgtttaggccttttgtatgttcagctgagacgctcttagccccacgaggccagtctcccaggcccaacacggcgaacacgtcccacagccacaggccacacagtcccgcatgcacccacgcacacggcggccggccgagagatgatccccaccgtttgctgcccacgaggacgcctagctaggatcgcccgtgcgtcatcgagccaacgctcaccatgcgcccacggcccgctggccggctcagcacggcacggccacgagaccacgagcggacccattctctcgctcgcctcattggctccaccccatgctcgggttcccaggccccagccgggcctcgtcctagtcctccccactccccagccccagatccaggtgcaataacgaattaacgaccgagtctcacgaggccacgacaatccgcccccacacggtgctgaaattccactgaaatagtagcactgctagctcttctgtgctggactgctcgtacactgcacttcattcgtcctaaaaagaattaatctattattataaaatatcacatccaatactagctagtttattttttttagacagaggaattacatatcacataatagtattagatggaatcaccaatacataaatggaataatcactaatatacttttctttgctcctactctattaatattaaggaaaaagtacaaatttccttctcgaactatcgcggtcggctgaattttccccctaaatctgaaaaccagacattactcaccccgaactttcagtaccggacgaattacccccctcgacctaatccagagcagttttgtcctacgtggcgtacgcgtggcaacccagtcagcattttcattttttaaaacatggtggggcccacctgtcattctcttccatctccctttcctcttcccctcttcctctttctttctctctctccgtcaggcgcgcacggcgggtcaagcgcgagcgcgcggttgcagtcggcgatggcgtcggctgccttcccgaaggaacggaacacctcggcacggccgacgaggcaggcagtcgcgaacgggtacgggagcccgccacggcacgcgtcgagcaccttggagaaatggcgcacggcctcggcggggaggtccgcgtccagcgccgccaccgcggcggtgcgccggcggagcgggagcttgacgtgcgcgaggggagctgcgacacggactccgcctcgcttcccgccgtccctgacgctgcgccggacttggaggctcttcgcctcaccggcgcggagataccattggccgtcaggttggacggcagcggccgggtctagagcagcgcggcggcgtcctccattaattcaaggtggaagcgggagcttggcccaagtgtcggcgcaggtgttcttggagaagccggcgaggacgcggtgcttgtgctcggatatgtcgaagcttcagaggaagcgggaggcagcgtcagagtggtcacaggtaggcgagagcaggtcggtgcgggaggcgacagcgaggttgcttgagccggaggagcaacaggaggaggaggaggaggaggtggaagaggagggccaccgctgccctcgcgtgccgaccgcacgcgccaccgtggctcctcttagccgtcgcgcgtgtcccccgagccgccgcgcgtgtccccgcagtcgtcgcgcgtgtcctccgagctgccgcgcgtgtcccccgcagccgccgccgcgtcacccgccgccgccgctgcgtgtcgaggaggcgatgtcgaggaggaatcacgtgctggtggtggcgaggaggtggaggccgtggcggcgcaggaactggcgcgagaagaggcctcaggtctcgccgccgacgaccaccgtctcaccgtctcggcgtggcccacgctctcctcgatctgggtgtgcagcaccttggacatgtcggccaccgcctgcttcgtgttgcgggcgatgagcgccgtgtaccacgccgtctcgggcatcttcatccgccagtagtaggtgagcgccgccgggacggtgccaaacatgacgatgatgcgccacacgtagtcggcctgcgggatgagggacgcggcgtggttgtcggagtaggacgacaccgggtacgcgtgcggaaaccccgccgacaccgcgagcgcgacgatggcgtcgaagaggatcccggacccttgcatggcgaacacggcggcgatgaaggccccgcgcgtcctcttgttcgcgtactccgacatgatggtggcgctgagcgggtagtcgccgccaacgccgtgcgcgcggcgcgagcggcgagagagagaagagatagaggaagaaaagaagagtatggcaggcgggtcctctaattttttattaaaaaaacgctgattggattgccacgtatgcgccacgttggacaaaaccgctctgaattggtttgagggaggtaattcgtccggtttgcatagttgggagtgaagaatatccggttttgtggttcaggggtaattcggacaaccacgatagttcgggggggtaattcgtactttttcctaatactaatatatacgaagcaaggtttttattcttctttcaaaaaaacataagtttgtatagcagcatctcacataaaaacagattttcttttctaggaatatagtaaacttttacattgtcttgtttggatgaacacacgatcaatatcgaaagagctgatttgcaaatggttgtgctcgcgtgagcgggtttcgatttggattcaaaaaaatttatgtagaatgtttctatatccgtcaaaagtttctaacattaactttctatgcataaactttttgaaataacatcccacggtgggccatgcatgtgggttaattaggtcaaacatgttcatgtatctaggtcacatgtgaacactcaccaattagacatccccggtcaatatatttagtgacaatggcacccaagtacatttttatgtcttatcttgagaaacataatataaatgtaggcgctcacaacgggcacaaactcactcctatgaacgtacacatacacatcttacccctataaacatctccgaaagactaagctgatatatcttaagattgacgagatcatcacaatcgcttcgctgttgatggataggttgcttatcattgaaagaactagctggtggcccgtgcaattgcgcggctagcacccaaatgaaatcatattgtcagggttatggataccacatacctaatagtagttgactaaatctcggcaggatccaccacataccatatcttatacggaaactaacctcgagggagttccggataaggaaagacaaccagagttctacatggaaacgacaaggactactcggattgtatccatattggtttccctaattctacttggacaaggggacacatatgggtataaatacaagccccttaggaggacagggagacacccacgatgagaagatcaacacccaccagaagccacaacatacaagcctatatacgccaagacaagccgccggatatcgacattagagatacgcctggatcgaccctatccggtactttcaaaggccggccttagggatctagcactgtctctgattccatcgggcgcgagttcgaggaggagggctaccctgttgtcgactacgagtcggaccttcagaccgccatgtcgacaacagttagataggctacctcaaatattgtactggtgtgattaccatgaataagagcaataccggcttcgaccaacaggatgtagggttattacctgacaattcaggggcccgaacctgtataaaaatccctgtctccatctcttttaccttagtcttgcatatatcctagcaccgacgatccccataccatgcaaataccagaattgtgacatcaaacgtcgacagtggcgcgccaggtagggggattttggtgcttcaggatttcgacgagatgggttcaaaagatggattctccaacaacaagctactcgatgacttcggctgtggggaggtctaatccgaccggaatatatcctccgacgagatcgggaccatcgccgccgagaaggagacgccgacctccacccggtgcagctgctgtcccaagtgcgacgcccatccaaggaatgccaagcccgacttggtggcagatcaatctgtatttgcttcgttcttgtgtccggttaggactggaattaggcaaacggaatacgtgcatgcatgacaaccgtgccgaccaatcaggactcaggagatatccatccacaggcctacatgttgacgtacgtacatatgccgatcggtttccaaaacctattcggtatatgcacatcaacacatgtctacacagcacgactgcataatattcaaacaaatcaacaaaggtatttagtagattgatttttataattgatctactaattccgtagatacatccggcatgtatctacaaaggtacgcaatattttatacacaatttatcgtacctatatttccaatttatacagtattgtcagatcaataatttattatgtttatctagagcatgcttcttatacaatatccgttgtgcgagtacttccgacgataggccaactatggtctaacgctgggggctcactccgttctcttatgtataaatcatgcttgtttacggtttacataatgcctgataattacatctgctcgttatgtcctgataatactagaagatccatgcagttttttgaatacatactcgatattatctactatatatcttgccttctagaaaatatttttcaggaacaattgagcactcgagtaggttatagtcgagtacactccattatcgagaacattctcgacaaatgcggagttatcacacccaacctaccaacgaagatcgacgacctatctcatagcaccggccatcgctggactactcgagaaaaggttgttaacggataattcctcgcgaacgtcgtcagcttgatcaccccacatgattgcgagcggacatccggatatgctgtaagttgggtatgtgagtcatgctggccacatgatatgcatatataataaaccaactttaccgcccctataggtgattaagagactcctactcctggttctcgaaccagtaaaacatagtgatctctcttgcctcactttaagtggtcgagttgcgactactgcctggtcctcgaccagcgacgtgtttctccggctacttccacttcaagtggtcgagttacgactactgcctggtccttgaccagcgatgtagcgtttctcccactacttctactttaagtggtcgagttacgactactgcctggtcctcgaccagcgacgtagcgtttctccggctacttccacttcaagtggtcgagttacgactactgcctggtcctcgaccaacggtgtagcgatttctcctactacctctacctcaacaaagttgatagtaggtacataatatcgccaagtgttttacccagagatcccttaccacgacgacacctagcgttgaaacctatcctattgtccctttacgccgtcttgacaatgcctccgaggaacctaaaggatcttcggctggggacgcccagagccgataaggccttgtcggatcctgtagagacaaaagaccatgtaagatctggtagtgtaagagttctcgccgtgcgtattaaccaatccgtgtaatcggaaactgagctttccaacttcacggctgggggctaggatcagtgcttattcaaccaaggcaggtcaagggtccaagagccttatcctccgagaacgattctccgacgacaaggctgggggctagggagagtgtatgactctacaaactgactgatcgaagtcggtaagagagaagacgctcatacacaaaacattggtcggtaaatttaattcattttcaatttaccatacatattataacatgtcaccctttgagcattcgctcgggggctatttctatttgatattcttttctgagtattgatttcaggaaaattctattcgacattatcgaagactccatgtctctatggttctacaccaagatcgactaaggtgagtacgacaaatgtcgacaaagctccgtcgcagactctacgccttctcgatcgctcgagaacggttgctggatctcgacaaggaatacagaatgaagagatggtgcacccaccgagataaaatttcttgacttcaatctaaattctcgattacagcaagacgagagacttagtcgtacgctctgtactttctcggtcgacatcagagattgacttagacaaaccctttcggtgcccgcacgaggctgacaaaggaagtccaacgttatctctaaactccccgagaacggtcacatgagctcgataacagttactccaatgtctgcgcgcagttgagaatatgaattcgttcatttgcatcgaagtcgggggctactgtcagggttatggataccacatatctaatagtagttgactaaatctcggcaggatccaccacataccatatcttatacggaaactgacctcgagggagttccggataaggaaagacaaccagagttctacatggaaacgataaggaatactcggattgtatctatattggtttacctagttctacttggacaaggggacacctatgggtataaatacaagccccctaggaggacagggagacacccacgatgagaagatcaacacccaccagaagccacaacatacaagcctacatacgccaagacaagccgccggatatcgacatcagagatacgcctggatcgaccctatccggtaccttcagaggccggccatagggatctagtactgtctctgattccgtcgggcgcgagctcgaggaggagggctaccctgttgtcgactacgagtcggaccttcagaccgccatgtcgacaacagttagataggctaccccaaatattgtactggtataattatcaagaataagagcaataccggcttcggccaacaggatgtaaggttattacctgacaattcaggggcccgaatctatattaaaatctctgtctccatctcttttaccttagtctcgcatatatcctagcaccgacgatccccataccatgcaaataccagaattgtgacatcaaacgtcgacacatatatttttcaatatggttttacttaaaatttattaaaagctatctacggcctgtgcattgtcttttctctttattatcattgggattttaaaaatcgaacataattatcgttcaggttcatttttttattttctagaagttccgccaaaccatcagcggctttgccattgtactccattatggctcgcctgctgcctcccttctttattgtcattgagatttttgaaatctaacatgattatcattggtttttttttactttttagaagttccaaacctttaaaaattggacattgtaggttttagagtttatgtcttgttgggtttcatgttttataatttttagaagtcctttcaagtgatgccactatacgcctctacagcccatctgccacctactctttattgtcattgggattctaaaaatcgaacataactatcgttggagtttattttttattttatagaagtcccgctaaccgtcggcagctctgcaactatactcctattcaccccgcccgctgcttctcctttttattgtcgttgaaattttaaaaaatcaaatatgattatcaatggggtttattttttcactttctagaagtccccgcaaccgccttacccgtttgcttcatggcctgcctgtcgtccctccttttaatcgttattagaattctatttgatgttttattaacagtttttatatgtcgtatcaaccacgaccactctactcctttataaccctgttacttaatttatcttcgtcatgcgttttagatggtcttttcgaacaatagtctttattttttaccaccatatttggttatttataaattgtattcctaattgaattttttttcttttttaatttcagatttttttttcaaatttttattaataccgtatagtgttcttttaatatttttattttttatttttgaatttaagttgtttcaaaattgtattcctacttgaactctcttttagtttttctaattttggatattgttttattttttattctgaattttaactaatctcatatcgggttcttatatatctcatatcgggttcttatatgtattcttctttcaatattgattatttgtaattccgaattttagttaattttaaattttattcctacttgaactctttttttctttttgctaattttggattttattattatttttattccgaatattaactaatctcgtattgggttcttatatggactcttcttttaatattccttatttttaattacgaatttcaattatttttagattttatttctagttggactctccttttattttctaattttggattttattttatttttattccggattttcattaatctcgtattgggtttttatatggactcttatttcaatattgcctatttttaattccgaatttcagctatttttatattgtatttctacttggactctccttttctttttctccgattaatgtgggaatttctagcccccacagtgaacgtggtgcctcctttcaaagcagttttaataatataatagatagataattagctctaaatgcgagcaccatgtcaagtatagaatcgaatagacaggctccaccaccagaaactcaaccagttgagttcagggtttacgattctgacaggcccttccgtttcgagctctggcggaattcggaatttcgtgaaatccggtggaaatccggtaaattccgaacaaatttcataaaccaaaacttgaatacaaattccctgagtttaccgataagttcggttttggcgaaattccgatcgaaatcatcaaaaattcgatcagtaactgagcctagtacatgcaatctagcacatgtaagtgttttctttttattattattttttttattcttttctttcctgatataagtttgagttaatacacacaatacattattttttaaatttttgttatcccaataggttctatgaatatcatagtatttataagattttatttgatttttttctttttttattaattctattttgaatttggatgaaactcctcgaactctcagatggtttctactttcgagtctcgtcgagccgttgaaatttcacgaaatcggaattgtaaacccaggttgagttatgcttactttgcatcatgaaagcattgtctcccccatcgtcataggtaattttttttttcaaaaaaacatttgtggttgtttcttttttcttagcttgcacactactcattctggcactagcagctagtgtgcacaagttttttaaaagaaaaaggtataatacatattatttttggagaggatatccgtacgaagaacccaaatttatgaatcacaaatcgttaacaatcaattgcaataacatcttttgtgtttttaaacctttgtagggaagaacggattcgatgggggggggggggggggcgccggctactttctaccacaaactcgatagcgtgcgcgtaccgtccgtccccccaacggccgggcctgcctacataccggacctaaccaacaaaccaactgggctggtgcacgcacacgcccccacgaacgtacgcacgcacgcacgtgcagtaatgagacgcaacaacttttggttattgcaccggcgcacaagcaaagtccgtcgtcgcagcaccctacagccaccaccaaaaacgaagtactactactgctctctgctcgatctttctctggaagggcgtggcagggttttggatctatggacatggatgtgtcactactcgctgcggcaacgcgtagtagcagtaggagtactgcgcaagggtatgcacatgcgcagctcgataggcaatacagctaggaatagtcacctagtattagtagccttttgccgcccgcggtgcaaaatcctccttggtagccgcgtccgtgcatgcatgcgcctcccccgaatcaaatctcccaactcctcccgcgtccgtgccttcgcatcgcgtcgcatgcatctccatgcgtgcagctacctatagctagcgaagcacccgtccatccatccaccagaccgacccccgtgccgtacgtacgtcgcgagaggctgcgagcgtgtataggtagagtacccgatctttcgctggccgcgccgcgccgcgcgagcgcgcgtgtcgtcttgtcacctcttttggccggcgcgccgctgcggcgatttcgcccagcgcgcgagagaatgcatgtgcgcgatcgatcgatcgacgtaacgagcaatctcggcatctcgcggggcgcggcgcagctagctagctagcgctgtacacacgcgcgatcgtgcatggccgcggctactagctagcggcaaggaaactggcggactggcggtgtgagtacgggaggatctgcttccacgtgcatgctagctgcgagcatatggcaaaggccatttgggtgcccatgcatgcacggatacgcataaaatggctattcgagcatagaccatgcatggtagggggtggtggtgcagggcatatgcagatgcggcagatgattagcggtaccggagtagcctttttagctggctggccaagctctgtacgagtacgcacatcgcagtatacatgctgatagatcacaaagatgaggcgatgcgcctctcgatcaggtcacaaagatggaactacgtgccacacgcaggtcgcacgtgcctccctccctccttattactcctacacacttggtggcgcatgcatcgcatgagattctcattagtactttcagctactttctgtcttcctgcatgcatgcgcggcgttggaatctcatctgtctaccgtaccagctgcaaccctgcaaactgcaagcgccctaaattaacctgccctgatcaaaaccaaagctatcacagcaacagctataatgctgtcgagattactacacctactccgtacgtaggagtagcattccaatccacattaaaaatgagtgttccataatgaggactttatatctttttgagctcccagttactatacatgtaagaatatactgtactgtatttcatgcacttattttccaatcgttcacctaaaactctggccagatgagcctatatcggtatatatatctcgtcttgagcacgtacagttggggctctatcaaaccatcccagcgtacatataacgtacgccaaacagttcggccatgagcccatgatgaacgtacgtgcagctggtacctggctacaaaaagggagcaattaatttgtttcgcctggtatgtatgggactagtttggatcagctgactgcaacttaaacagctgcagtgagcatcattggatgcaaatcggacggtctagaatctctagattacacactgcacagtccatatatagcactgtagcaaaatactgcagtacggagtcctgttcatattgttactatatatcattgaatttgaaccgttgatataaaatcggatggccaaaattatgtgtagtagttactccgtaactcaatttgaaccgttgatataaaatcggatggccaaaattatgtgtagtagttactccgtaacttgtagtggatctataaatttgtacatatgtacagcactgttcataatcagctatactctattgatttattggactcacaatatatataccagtatatgcagatggcagaactgatgcatgagaagttgtaattgtaataaacacatatcactactagagaaaggggctttagtcccggttaggaacctcctatactcccgattatacaaccgggaccacgaattcaggactaaagatgcccatttttaatcctgggtaaaataaccgggagtaaaaatccatttttaagtcccggttggtgttactaaccgggactaacaccaactgagactaaaaatggagccaggataggtccgtttgctcctttatttttttttcttttcttcattgtttttgatatattgatttcactctatcccccatccccgaatcgtgaaatcccaaatcaacaatccccaaatcgtaaaatcccaaatcgattgtcacctccaaatcctcaaatcgatcatctccaaatacatcacaaaatcttaaaaaaattacctcacaagttctacaaaattcatcacaaatacatcacatattcacatcacacacaaatcaaatacatcttagatccgaatcacaaattctaaaaaaaataacaacccaaatccggcaaaggcacaaccggccactgtgcgccggccgccgccttcagcctgccacagccagccgcgctgccctccgtgctagccgctcggccgccgccgcctgccagagaagtgggagcaggggggagggggagggggaaggagaaggagaggaagagatagggctagtgaggagaggaggagatagaaaccacacgcgcatgcctcctcgatcggattcgcgcgcacgcctcgatctccgtatatgccgatcttttttcccactacaaatagatctttataaagaaaatataagggtctgacactggctgccgttttttgaaccgggactaaaaatgatctttagtcccggttgatgttaccaatcgagactaaagatcaaaaagtacccctgagcttttaaaccgggactcaggtttttattagaaccaggactattgtgaaatttggccgaccgatcaaaaatagtttctccagtagtaccttttcttggtgctaattagtggggataagtactgtatatcattacggatttaatttatggaagtgaacaatatagaagctttttgtgcactgagttcaactagtagtggagcttcacaatatagttaactagataaataccccgccgcattaatgtgggaaattaagttgtatagtatgtacaaataagatgtaatatgattattaaaactaacaaattgatacttgtgaattttgagcctaaaaataatgcatggtgttatcggagaagaaagaagagataatttgaaccatagatctatcatacaaaggctaaaaataattggggtaatgtggcttaatgagataaaagagaaatggcattaactatacttaatggtatataagtatataggatttacagatcgaattaatagatggggccacacattaatatgaacaagttggtatccatagtgcctctccctctaagctagctaatgcatgttttggacattcagcattcaattgccgtgtttagtacattttcagtgctactccctccgtcccataatattattataagggattttgagtttttcttgcaacgtttgaccactcgttttattaaaaaaaattgaaattattatttattttgttcgtgacttagtttattatccacagtactttaagctcaacttttcgttttttatatttgcaaaaaaaaattgaataagacgagtgatcaaacgttgcaagcaacaactcaaaatatattatattctgttatggagggagtacatgactctcacaacactataggtccccgtgcactgaagaggaagtctcatgcacctctgaaaattcaacatattggcaggcagacaatgagagagttaagcttcaacttgccatacatatggctggcactgtgtctgcatttctgtatgtgtggtgtgtgtgagtgtgtgagagagagagagaatgagagagagagagagagagagagtctgagactgtatgaatatgtgtgcgagagagtgtgtaaatgctaagcggttacaggggcattgaagagggggctcagtggctctcatgatagctagcagagggcagcgtagtagccaaggaggagggaaaagagatcgacgatcgcagcaactcgcatttacttgcagtttgcagctggagtagcttgctgttggcgctgtacgtttgtaacttttgtaaacctaagttgccaaaaaggtgcaagtcaaaatgcaggcaacccaccctcacatctagtaccccctctccccaaacttgggggcctcctttagttctttcccatcaccacactgacatctacaagatcacaaagatctctctctcctttttctttctctctctctcgttgcgtgagcttgtagcaaagagatgtgatgcactaggttggcagtagatagccagtactaccatgcatatatggatgcatggctctcgatctcgtaggagtacatgtacacatccctcctcctgatgggtgaccatccatatgactgcagggccttacagggtgctgtaacgcatcaaccccctgaacctgaagagtcacaagtcacagcagcagcaagcagcaacaattctttccttttctccgcagtagttttactacagtactaccctttattcctttttctttcacacgcatcaagggcacacacatgcaatgcaagtacatttttctcatctgataaaatgggacaaaaataaaggtttgcctcatttcattgatagagaagatagaacagctacacaaacacaacaaagaagggataattaaacaccaaatcatgcatgctgaggctggtctgaaactttggtcgtcaacactgtcgatctgcaccgtggcacgtacgtcgatcgatctctccatcatatcacatgcaagcacgtatacacattactgtacttgctactataccatatagtacaacgacatcagccatcgattgatcacctgcatccgtcactgttatgaacttataatgagtgctgtttgcgcgcacatacgatgataaaaccgttcgtgcatccgtagagtatatgccactgtgtactacagagagattgactgttcgcgtatgcaggagtaggatccaacatatgtgtgttcatgcatgagcattcgatctaattaagctatgactgtgtttatatatatctaaagtttggatccaaacttcagttattttccatcacatcaacctgtcatacacacacaacttttcagtcacatcatctttaatttcaaccaaaatctaaactttgcgctgaactaaacacaacctatatggccatggctagaaaccaaccaaattaagcgcggtccccagctaagctggatcgagttccatgttgggagcaaccgtctcgccaaccaactgcgcgtgtgcggtttcgattgcatgtatggcaacaccgtccggctgggcttcgagctagctcatagaacaggattacaggagtagcgaattactgatgtctcaacagtcaacatgtcttcccgagctactacacgaatggaattaggccccatttaagttcactaaaaatatatatgaacatttagtacgtatacagtgaaaaaaaaagtcattagtgcatgattgattgagttttaattattttaaacttgaaaaatgaatttatttgttattataaagtaacttctatgtataaagttttcgcacgaaatataccgttaaaaagtttgaataacatgttaatggagaccgaggcaaacctggttcttaataaaaaaattagagctttaattagttcgtagaactgaccaaaagctacttttttttttcgcggggagaccaaaagctacttacgtcctctaatgaatgagtcattaaaaaaaatcgaagggtgtacccaatcccatctgtccatattcgtagttaggattaaacttttttttggacggagggaatactcaattagggtgtgtttagtttacgctaaaattgtatgtttggttgaaattagaaagatgtgacggaaaagttggaaatttgtatgtgtaggaaagttttgggccatgtttggttgcaaaaattttcttcaaacttctaacttttccatcacatccaaactttcctacacatataaatttttcaacttttccgtcacatcgatccaattttaaccaaattttcaattttaacgtgaactaaacacacccttgatgtgatagaaaagttaaaagtttgaagaaaaagtttggaactaaactcggctttattgggaaaaaaaacggagatagtaatgtattttgttttgaaaacaagaacactggatgcatggttgttgcagacatgctagctgcagtcaatgagaagttgaaaacaatgcagggaacggaagagaggaggagcatgcagcagctgctacagcagggggcctcaaaattgaaaacgtttgccggccggcgcgcgccatggcattctgtctctcccataaaactcgaacagtgccagtacacagtcgatcagtcgtcgcggcgcgcgcttagcttagctgtattcctctccgcggccggccggccgatcggtcgatcgacgcatgcagcgccgcggcgcgagcggcgagagagagagagagagcgcgcagctagcggcgcggttttgaaagagcgggtttgttgccggagctcataaatgggcactgcttcatcgcatcaggcctttctgttccacctttatgctaccacatcaagtcccatgtggaaaaggaccacagctgctagctatagctgcatcgccagccaatgcaacatggcatgcattcatgcatgcgtatcagcatatgcaattgatgtttcgttccttctagctagcttaggtgaaaggacgaccaaatgctcgtaaagccattctgttccatccttcctctctctctctctctctctctctctctctaaaaaagtctgctactagctcttagtactacagtaaacatccctagttacaaaatttgctagctaataattaacatttgagaccaaggaattaatgagtactataccaatttgctgtttgccatattatatgaaagctaggccgctcgatcgccaatgataaagggagagaacaaatgcttttcaagttttttttccctgacatgaaatttggttgctggatgttgctagcattatttaatttgtgcgcctgcttcctccgttttgcctcccgacccgtttattgtgaccctcgggcactgcccattgtcgcgctatataaagacagcaccacccttcttcaccacacttctcagctctcaccactcgctaccccccttttcttcttcttcctctagccaccaccatgcgtgacgactcaagcggcagcatcgtccaccattgctgctgcttcctccatggccgcgcaagcttccggccatcagctggttcttcctcgcttgcctccttggggcgccattggatcaggaagaggaggctgaagacttgcagcaagcggtgcgcccttatgtgatggccctatccccaccgagcttttcttccaccgcccctcctctcgttctattctcggatgcttcttgcattagaggcattcttttcgtttcgatgaatgatagttaagcggtgtcttcttgaccttgcaagacttttcatcgaaaaacactcttcttcacttttctcgtaatatccttgccaacatttctcgtcctctcgcgtctatcactcctcccatcttctttgtccccgtctatccctcttgagcttgtgacttgtgtgctaaggtactttagatgtactacttttgttattatagatggctatgtagtgagttggtctatgtttctgatatatcttttgagttatgaatcaattagttgtatggtcgtcactcgtcagtagttccttgcgtggtgattgatctctctctatatatatatgctccttgttttattgatcctaactaacagggaaagaagatatgccatgctagtaagcaaagggcaacgcttgtggtgtttaataccttgtgcttgtgatatgtcctctctctctctctctctctctctctctctctctctctctctctctctctctctctttaacccttgttcctgtgtattcacagtgtgtacatcagtacatgttggtgtttctgattctctctttattttttgttgatgccgtcacgcgcttggacagttggacgtgcaaaatctcttgctatatatattatgctgtgtgttgtttcgtccgtgagactgtgagagtgatgttaatttgttctccggatcctctctgatctgttcgcatttgctgcgtcgaaaatgcgagacggaccatgcatgaaccgcgaacacagccgtcgtttcaacacacaaaaaaaatgaacgaattttcactggtcgcgctggctctgcagtctgcacggacactatttacgtgcactgaaacatccaggaccctccatcgagtatatatgcacgtacacgtacgtgggtgtggtcctacgatcgaactgcatacatctaccggtcgtatatatatacggtagatgcggggtagtagcgttatattaccgcgtctgcccacacaaattaacatataccggcccgacaccgatcgcgaattaaccccgcattcaaatccccgcgcgtcgtaccacgctacgtacgtgcgatttcatcgcggatgcgcaggcgcgcgggcgccgcgcgacacccacaactgaacgcagaacgcacgtacgtacgcgcgcgacacggcgccagcagcagccatcccttcccgggcgcgccgccggctgatcgatcggtggcgcgcggcaggccgggggcgatcggatccatccgaaacgctctcgcgcggctcgccgcgcgcccggccctcctgctccctgcccggccgacacaccgtacgtgcgcgcgacacagatcgatcgatcgatcgatcctgcgtatagctaagctgaccaatatcgattatcgtcgcgccgcggcgcgcgcgcgcggcgacgagccgacgacgtcatcaccagtccggccgtacgcctcgcggccacttgcatatcgatagctcgatcgatgatcaacaggggccgatctgtcgtggggatgcccggggtgctcgagcccccactacccgtgatggcgggatcatgggactgggctcttttaaaattttcgagggcttgtagctttatatagtttattcagatcaccgttactattttgcttaggttcgatatattctggtggtcaagcgtctttatatagtttgttcagttctcttgctcttttttttcttggattcgattctggcgatcgagcgcatttatatagtttgttcagttctcttactactttttcttgggttggattcgattctcgcaatcgagcgtcttcattatacagtttgttcagtcctcttctactatttcttcttggatccgctcccatatgatagatcgtccgatacgctgccatggccccccgggcggcatgcatgcgcgcgcggcgacggcacgcacatggtgacaagcttagtcgtcgacgcgcggcgcgccacttgccactcgagagggcccgttgtctgtgtgtggccggtgcgtttaggttagcaacgcactataacagtaggattgacgattgttgacaagctagctagccggcctgcatgcatgcaccatcgctgcggcatatgcatgagatgaaaaagagagaaaccgggggatgtcaccctgctacagcctacagcgtttgcaccggacggacggcccgacggctagctagcaacgaaagattcggtatcctacagttccctccagcgatagatcatagatgaacagggtatctcatctcatcgcattggatttcgaacaattggggtactccctccgtcctataataggtgacgtttttgactttttatttgtaacgtttgaccattcgttttatttgaaaaattagtgtaaatataaaaaaagataagtcatatataaagtacttttgataataaagcaaatgataaacaaaataaataataattctaaaattttttgaataagacgaatgatcaaacattgacaaacaaaaattcaaaaagacaagttatatgggacggaggtagtacgtagcatatgccgacaaataaatgcacctgcttgagaatgccttggtcaacatatagggtttctgtaaagtgccttctactgctccagtgctccttgctcttccgcacgaggataatcattctcaaaataaattgaggtccttctcattctaaactttacatcatgtcacatcaatcgtttgaacacctatatataatattaaattaaagctaaaaaattaactaattgtaaagattgcgactaatttgcgaaccgaatcttttaaatctaattgctttatgatttgacaatgttgcgctagtaaacatttgctaatgatgtattaattaggcttaatatatttatcttgtggtttactgacggattatgtaattagttttcttattagtgcccaaacaccccatgcgatatgctatataatattcgatgtgacacgccaaaactttacacccctagatctagataacccctaagttatggcaaattttgctacaagacatcgcgactttgcggttttagccacggacaccgcacgaagtcacttttgggggaagacactcttaaaatgtggttatttgccgatggacaccgcatacattaaaatattaatttttgggtcaataggagagatgaacactgtaaaaggtctaaaatacccctgggcccacttgtcatattctttctccctcaacaaactccctctcacactctagccaaagcgccaccttcgctgcgaaggcgacgaggagtaacgcgtgcggggatggccgccgcgttgcccgagcggaggccgcggcgaggaggaacgcgtgcagggacgccgcagcgacacctgctgtgtcgcccgagcggacggaaaccccccactgctccgccttggagagagccacgggtgcggtcctgccagtctgggtgcacggcgagcagcacaatggcccgggtgttgaagccgttgtcctgcttgtctttgagctcagtggtggtctcgtcttcctcgccgctgtcgccgccactgcgtcggccgatgagccggaccaggccgcgcttgatctccctgtccatgccccatgacatcctgttcttggttggcaggaacctgttcgattgaattccggcgccaaccacgagctcaatttcggcgagaatggctaatcgtttggaagtttttgggttgttcgtggagtttacctatatcccgggatgagcaccttgcggaaggcctcggaggcgaacgccatgaggcgggcctgcatgcggaacacgacgcggctggagtagtagcagcggccgtacgtggcgtgcgtgatggcctcctccgccgtcggcgccacggccgttccctgttgctactgtctgagaaagaggaatagcagatctgacatgtgggcccaagggcacttttgacatttcacgcgatttctctctcctcctcacctgaaaattattattttaatgggtgcggtgtccaccagcaaatatccaacttttgagaatgtctttcccaaaagtcacttcgtgcggtgtccgtgggctaaaaccgcaaagtcgtgatgtcctgtagcaaaatttgccgtaagttatctatccatacatgaattgatcgagaagataaattaaagctaacacatgaccaccgcccaaaaacatactttctccattctaaaatagttatctttctaacattcaagatttattttaaaatacttcttatccaatcatcttccattcaaatttctcactattatacctctaactaccacaccacttctaataaccatatactgtattatcatttaatgagggagactatgttattttttcttaaactttaatacatgctaaactgcctaaaatgacaagtatttcaagatagagaaagtagcatattggtttgtacatcaaatatgaatcaacacatgagttgtaacatttgagattattcagattatggtgctctacaccatcttgaaatgtgaaatcaaaatccaaagtatgtttaaagaaactaatgataaattttctgtgagttgtaacatttgtccttaaaacttctactccttcatttttacgtgcatgcttctcaaactgctaaatagtaagttttatacaaaattttctaaaatgggtaaaaggaaaaaaaatagtggagattttaatatatgtgtccaatatataatgtctatgccatgtgatcaaactcatccaatttatccaatttatatgcaaattagataaaaaccactatgcaaaaccatcttaattaggaggttatataaatggtacaatattgtaaaatttagggggttgaatgtccggtttcaaagtccaaagtgctaaataaactttcatctaaaatgtagggtgtatttggactttttcaaaatcatattaatccatttttaagtttttagctaacacttaattaattatgtgctaatctatcgtttcgttttaagtgctgagaaggaagagttcccaacgtccccctcaaaggaaaacaaccttaatattccctattgatttgccaggtgtttctcaatcagcaacgtcttaatttgaagttgtaatttaaatgtaagcagataattaagtttcagatatactccatactagttgacaaggctctttagtttaacaggatataacactttggtagctgacattgctcatatgttatcgtggaagggaaaatattttccatactgttgactacacaaactaaaagattgtgcatatatgcaccaaaagatagatagatatcttcacctataactacgagacatttgtataaattcataactctcagctcattgaattggagaacagcatgaagtgattattaattacaaacaccatatataggcctggtttagttcccactttttcttcaaactttcaacttttccatcacatcaaaactttcttactcacacaaacttccaacttttctgtcacatcgttttaatttcaaccaaacttctaattttgacgtgaactaaacacacccatagaaatctgctatatctaaacactatatatagatggttctggccatctcgtgttcaaaatcatagaacacccaagaagtgcgcacggtaaatcaatgaagccgctgtatgtttgttaccgtgtgtgttttttgcatgttaccaggtgtttctggcacacgggagccttctcatccctagtcgtgaatccgtaaactttctatatatattggagacgtacgactctttctttcaagaaaatctatacttacagcaagcaagaagctcgttttcaaaactcaccatgatgaatacaatggtgcactactacattcatactcactccgtcccaaaaaaaaacaaaccctggtttccgtgtctaacgtttgaacgttcgtcttatttgaaaaaattataaaaaaaattaaaaagataagtcacgcataaagtattaatcatgttttatcatctaacaacaatgaaaatactaattataaaatttttttatataaaacggacagtcaaactttggcacggaaactcagagtttgccttttttgggacggagagagtagacaatacgtaatcattgtcctacaattcccaacaattacagtacagtgcttcttgatgacataaagggttatagtacaggatgaaacagttgcacgcttgaaataatgcaaatgcaattcagcaatatgcgaataaagtgaggtccaaagaaaaccacatgtgaagtaactgtagccaattattaggccaacataaaggaaagcatcactaacagttttgcagcgactctatgaagaacacaggacaaaagcatcgacgcactaaatccagaatggaacagtgtagcttgatcaacgagttgattatgcagggagggtaaggtttacagcggtccgggaaagggacacgtccttttctacctttattcatcccattcctcgacctcctccagtaaacagtcaaattctttacaaaccaaattgaaagttcagagatattgcttccagttttaataacacagtcagaagcacaccagatcaacaaaacatgattttctcaggctagactgttatatgtttttttaagtgaaaacaggtcatgtcaaaaatttcagtgttcatgctggaaagtgaaacacttggtcaaagttaatacaatttcctgagcatgttcgaatcttttccaatatttatcatgtcaacattgtttaaatgagtttctataaatggacacaaacaaacgtttcaccattacctcgtattagcttctggaataaaagcaaaaagattcattactagccttcaaacattttctttttctcccatcatcaaaccgctgtttgattaccaattaattgcagactgctcagcagcaaagttgttaacttgattttcctctatgtgttaactgttatcggcatggatgatgcccagcaattttttcttttggggtgaactcaataatgcattggaggataaaaaaggtcgcgagtactagtgaatcaactgcaatcaagaaatctggaggacggatgtgtggcatcttggtttattcaaatgatcaaatcgtaatattctaggagaatgacattacattacatagttttaatgtgcatggggaagaaaataaaaggacaggaatgcgtaggtcaataataaaggaagagagggtaaatgtgtacactgtaagtgcctatattagatgtgcatgctcaagccactattcgcatgtgcaagtacatacccgcacattgactattaaaggtgcaaagacacagtcaccgaggagaatattttcaaggagataaaaatagctgacgatgataaactaattgcagaaaactgtccgggccaggtcaatgaatgctgattgcagaaaactaatggctggtttggtttgaggacctgctaaaatttttagtagtgcaaagcccaatgcttgggcaagtttgggactaccaaatttttggtagaggaaagttgagaagagtagaattgatttgatgccaaaatgtgactatgagagacaactatgtgaacaaaaccccaacgttttggtagtgcagtacttgatttatttttttttaaaactaaacagtacttgatttgttaccctaccaaattttggtagggcaaaatttggtatggtagcaaaccaaagtagccctaagccaccggacaccagcaaactattcatccagtgaggtttaatcaacaaagagttttgagaagacactaatacatccgctcttaagcatcacactaactgaataacatgaagatcaacagaaggaaacaccattattttttaacaaatttctgatatcaagtcatgtgttaattggtaagtggaaacaactatgcttgttagttttacatggccttatcattggtattgtgtacccaagtcgatatctgacatgttttgcattcagaaataatgcatgtgaaaaaaaagagattatcctgatactagctgaataagttgtcgtttgccacaacagtttaaaatggcaagtggtagcagtgtactcacccattctccatggtaaagtgatctgtagtacttcacaaatttctcagaggcaccagtgtatcgtcccctttggcactcaaaacacttgaagccaacaaacttcattatagaaaagaaagtaaggacatatattattttcaaataaaaaaagttgaagtacgaaacacagagaaactgctaaggcctcactgtggcaaactatacatgtggtactcaatatagccagtaaaacagtgcctggttttagtttgttgtcagaaagcagaggtcagcaggtgctgttttcagttaaatctgaagattttaaaaaagaaggaacttattagcaatattgagaatagataatacaacagaataagatgttgtatgaatgagaacatggtcatgaagggtgatgtaaaaagtgggggaaatgaaatgaagtgtttatatgtgccagtaaagtttcagaaagagtaaatgggtcatcaatggaatgtattaggattggtttgtttaattaagcacacttggataccagattcctgttcattaaaaagacataggcccaatgtattaggataggcctatcaaattaaccacactaaaaaatagacaccagatttcaattcactaatcaatttatcataggtaaatttatttttccactggtgtgaattaggaaagacatgcagtggtaaatattgaagtgcactgtaggcagtaatcatgatgacactaaactgccataaccagaaattacctgcaaccggaaacattgagaagaacaaactgaactgataagcaagacataggccctgtttgggggagcttctcccagctgcagcttttcccaaaagctacttctgttagaagctgccccaaacagtccacagcttctgagaatctgtagttacagggcctatgtcttgcttatcagttacagcttctgagaatctgtagttacagattctgaaaaatgaactaagatgccagaagctggagaagctgggtttcagagcttttccagattctcagaagctggctaccaaacagctgcttctcagaatctaaagctcccccaaacaggccctaagaaacgcaattcagtctgaaatgttaaaacagatagagaacaaagcatagagcatttgcaatttcatttcgaaatacttcaaaagcttcagactactcttaaataataaactgccatgacatataatgcgaatcagaataatcaacttagtgaaggaattatcattgttctattatgtcaataccaaaagagaactattaccaactagtgaaaatttctaaagaactgaaagaatacctataaggctatataacatgtgaaactttcagctagtaagctgagcttgcaaaacaaactttaacactttaaactgagcattcaaactattaaatatccctatttcaacttaggaagcagaatattcactaatttagccaaccgatggatttccgtatctaaaaatagcttctagcacaaacttcaaaactttcaacttgaatattccaattttcaactgaaaccttccaacttagacccattcatagagagattacactatagttaataaactagatcagaagcttcactgccatatcaatctaaatagattattgcttcttccttgcacccaacgacatggaattttactatagcttttccctgacaagatttgtgcgcaggcacttgagtgtaaaatgagagaggcgcaaaattcccagcctcccagggggcaatgatgcaaccacaggatgaggcaatccaatttcctagtactaaatttaacctacttaccgccgcagatcgataaaccgcacacgaccacaccctcctgcaataatcatccccctcttcgcagcctccgcgtcgctgatgacccctgacaacgcaggaccaagacttccagaatgatccccccggttctcggatttagttaggggcaacaatggcggcgagccggcgggtaccaaatgggatggagcgggcggtgtgggactccacagatggaacggaagcttctggaaaggatcgcgtacgcacctcggccatcatctccggggaggcggggcgcccggttacccgccggcgtcgcgcggcgcaacggcgggacgccgaggaggcggccgcggccgcggcggtgcttggtgggcgaaactggcgtgggccgcggccagcctccatggctttaggcctatgggggttggattcttgtagctgatgggcttacagaccagaagagcccattgggtatagcccaataagcccagaaggagcgatggtccatcccgctatgttggtgggcttttttcttggatacgtgtgttggtgggcttgatatgccattggacttgttaggcggaataagttcactttatgctcctcatctgaatgtcgagtttaaatcacattctttaaccgcaatatcataaatcttgaccacccaacttacaaaaccgggttgaattagttccttcagaggtatagatggatggttttgatgatgtggtagtgaaagggtcaattaggcctagaggggggggggggtgaataggataatttaaaactttatgcggaagctaaaactgagttagggtcggaaagtctgatccacagtcagactatccgaaaatatcagatagtctgatgttggatcagactgtctgatccactaaaagaacactacaagaagatctagtgcacaaacaagagtatggcgcaaacagtgactagatctatagcagcacaaaagcaaagctaaataatgggagaagagatatcaccaacaatgaaattcaccgagttgttcccggagttcaaatccttgaggggattctactctccgttgaggagctcactaagagccgggtctttgctaaccctttcctcaagaggttgcactaagcactcctccttccactaaagggtatctctttccttgtggaggcgagatccggccttcacaaacttctcccggccaaccacacgtagatcggtggctcgggagtgacacctagccgtctaggagtcctcaacatccaagagtaacaaacaccacacaactcttggtcaaccctagtgctcaagatcgagtgaaacacacactaggccctcaaaccccaaatccacaaccaccaagatccaccacacaaagaacaaggagggatttgagagagggagaaagagctcaaagatccaaagcaccttagcaccaagctcaacccaaagtgaatgagaatgaaatgagttgggtaaccctagaaaagggttaggtggggggtatttatagaagccctcaaaatgtggccgttgggagagaatcttttcatcccacctcggaaagtccgaagtgacatcggatagtccgatgtttttgaccccccaagcaggccagagacagagaacgaaattctggagaattttggacaatccgatcgatcggatagtccgatgtcatatcggatattccgttatttttgaaccaagaatttcatcctctcacagagactcaagttccattgaatttcggagtctctggatcatcggatactccgatcacatcggatagtctgatttaaaactcactcaaaaggaataaaaagcaattcaaaacagagagtgaagttttgagaaatttcagatagtccgacgtatcggatagtccgaccttatatcggatagtccgatattttttagccaacactcagacccaagacagtgagcaaagttctgtgaaatttcggatagtctgagcatcggatagtccgacagacataaaacaggaacacttcaaataaatgattttgagcactagtgttctaccaattatatgcatgtggcatccctcttaatagtatgacatcctaatactcaagaacacaagatatacatggattagaagacaattaccacaaaagatgccgcaatacttattgtgttgacatccactcctttttcatccttgcatacatctcaacaaaaagcattagttaccctctaattgtgttgtcattaacaccaaaataaatgaggggtcctagatgcactttcaatctcccctttttggtgattgatgacaacacacttagaagtaataaaagattaggattttggtggagctccccctaaagatatgctagaaatgaaataggagagctccccctcaatctatgcactagattagaaatgacaatataacctcatgcatatgccaatgacaagatatttcacacatttgagcatggataatagataattgcacataacaagacacaaaagcccaagattcgactagccatcacgaaaggagatagattaccttccttctcctcttcttcttcctccataggagccttgccacgatccgcatgagaggagcttgcctcagctgcaaaagggtcctcaatcacatcctccccactgtcctcaacctcagaaccatcgggagaacacggcaaatgggcgttgcgaaggaggttcttgagccgtcgagtgtccttcttccttgctctgcgttccttggcttgccgaactgagatggtcttgcataagttgaagatggacttgaagaacctcaaggacgagttggagtccggcttggtgacggtagcggagtgaccggcacgagaagaagcacgagtggttcgtccagccggcacaacagcagccttgatgggacggacttggtaaccggtatgtgccacctccttgtgaaacttcttcttggacacaatctcaatcatcttcgtaatgtaaggcccatagctaagtcctcgcttaggcatcatagagataagccggatttcttcaaagatgaagtcaaaggcgtcaaagagctgtgggtgagccttcatcttgtaaagcaaatttcttgtataggcaaggacgttgctagcatcaccttccttgggattaagagttttgcgcaagagcttattgagataggcatagaagggaaggagacctttgatggtgcctaactcatagtccacatcttggtacaagaagtgaagagaatttgtgtccatgggcttctcatcatgaatcttgacacgattggagccggaaaccccaaaatggcagcaaacttggcatatgacactgagtatatgatgccatctatcatccaatgaatagtcttttctttgttgggctcaaagtaaactgtggcatagaattgtgcgatgatttccttgcaccatgggtattgcaagcccatgagttccttcaagttttgccgagcacaagcttcaatgacttcatcaataattggatcatgcaactcctccatatacttccaatcaacccactgcataagaatagcccccttcttaggtgcaatcactatctcatagtaatcctgctgaaaaaggttccaaaaccgaggatcagtggacaactgttgaaatttgtagggatctttcttacactctttctccacttcagtccacttgcggttccaccttacgactcttcgatgataattaggatctctagagggagcagtgataaagaaaggcccttcttcctgagcagcttgctgagcggcaatgtcctcttctaactgaatctcttcctcaaaggatggtgcatgagaaccactaccgtgacccggctcagaagaatccgtaggattgcctctccttactttgctagcaggtgcacttgatccttctccactgactcggctgcggcgaagaggaagaggagcaccacactccacattagccacttgagctgcttggtcagaggcttgagcttgcgcgtcaatggcatctttgcgggattcggacatacgccgtatagcatgacgagccttggaagagggagagcgaccttgagaactcattgacccacggcgagagtaaagttgattcttgaactgacccctgatcatgaggatacactgatttagaacagaggataaagattaagaagaagtggaagaagaatacttaaatgtgaagcaaggagaaatttggactgggccaaaagaaggtcggatagtctgatttgacgtcggactatccgatgtacatcggactatccgacggcatatcagacaatccgacgaccttttgccctagaccaacaaatctcgattcacacaagaatatccaatagaatcaaaggatcttgtaggtactagatctagacactaaaacaagaagattcgccgaaggaaatcttgaaataatacatcatgagggagatcgaggaaaaacaaggaaatacctcaagaaccaccaagagaatcactggggaaccagtgatttggaaggagttgagggagggaaaccaccctaaagcgaaggaatagcaatcggagactccgaaacgaagatttttggtggcctagaactagggtttggagtggagaagaggggtggagagagaaacgactgagacaaatgactgaaggggtaagaaagagttacccctagggaggttaagtccccttgcccttggccccacgtcgaatagtccgatttgaaatcggactgtccgattatggtcggatagtctgacttgatgtcagacagtccgacatcctttgtggcagagacaataaaggatggctcaaggaagaatttttcaacaacattttgataggatgaactcgatggctagactattacttggacaaatgcagcaaaagaaagaaaaactaggcaccctcgagagagggaatgtacgaatctatagcaaattgtgcaaggaccaagattcattagagaatgagatccccgtacacatagattcaagttatccacatagattatgactagtgtttattcatgaattgaatgttcactttgtcatgatgtagcaagcaaacctattctagtaaatgaaaaacaaatgcatgcaaaagatcaagccacattccgagaatccaagatgtttagctcacttctcaactcacaaaacctagcttcatctagagacttggtgaagatatccgccaattgtttgtcggttctcacatgttggatatctatgtcgcctcttgtggaatggtctctcaagaaatggtggcgaatatctatatgtttggttcgggaatgttggacggggttattggctaacttaatggcgctctcattgtcacacaagagtgggattttggacacatttaggccatagtctctcaaggtttgcttcatccaaagaagttgagcacaacaactccccgccgaaacgtattccgcttcggcggtggatagggcgacggagttttgcttcttggaagaccaagaaacaagggacctacccaagaatttgcaagaacccgatgtgcttttcctatccactttgcacccggcataatccgcatcggcataaccaatgagatcaaacctcgctcccttaggataccaaagaccaagattaggtgtgtgcactaaatatctaagaattctcttcacggccacaaggtgacactccttcggagcggcttgaaatcttgcacatatgcacacactaagcataatattgggcctagatgcacaaaggtaaagaagtgagccaatgatggaacggtataccttttggtcgacgtctttaccttgctcgttgaggtcgaggtggccatttgatggcatgggagtgtggattgcttcgcattctccattccaaatttcttgagcatgtccttcaaatactttgtttggcaaatgaaggttccttcctttagttgcttgatttgaaggccgaggaagaactttaattcacccatcatggacatctcaaaacgtttggtcatcatcctactaaactcttcactaaaagacttgttagtagaaccaaatatgatgtcatcgacatatatttggtacacaaaaatatcattatcatgccttttagtaaaaagagttgaatcggctttcccgatctcaaagccatttttcacaaaaaaattgcaaagacactcataccaagctctaggggcttgcttaagcccgtagagtgccttgtgaagcttgtatacgtggttgggatattttggatcctcgaagcccggtggttgctccacgtataccaactcgttgataggcccgttgaggaaggcgcttttgacatccatttgatatagcttaaaattgaggttagtagcaaaagcaagcaatatgcgaattgactcaagtctagctatcggcgcaaatgtttcactgaaatctaatccttcgatttgggtgaacccttgcgccactaacctcgccttgttccttatcacgaccccggcctcgtcttgcttattgcggaagatccactttgtgctaatcacattttgccgaggtcgctccaccaaagtccacacttcattccgggtgaaattgttcaactcctcttgcatcgccatcacccaatccggatcattaagagcttcttccacccttagaggttcaatagaagatacaaacgagtaatgctcacaaaaatttgcaaagagtggatactcccttgttgatgtctcctaagatgttgtcggtggggtgatctcgttggatactttggtggatttttgggtgagctagatttatcggagagagtggcacttgctcgccttcttcaccttgatccaagcttgaagtggagggattgtcggcttgggttgatgtaggtggctccacttgtgttgaggaagagaccccttgttgtggctccctaggacgcacgtctccaagagccaatcttttgattgcttcgctagggtcctcctcttcacctaacacatgtgagtcaacttgctctacttgagagccgttagtttcgtcaaatgtcacatcacgcgcgatctcaacaataccggaggttttgttgaaaacgcggtatgcgcattcatttgacacatacccaagcaagaacccctcatcaactttaggagcaaactttgaggatctagccttcttattaagaatgtagcacttactaccgaaaacacgaaagtaagagacattctctttaccaagaggacgttagaaatggaaaggtcattggagattgcaatcttacccaatcccattacttttccctttccatcgtccccgaagactatgttctcttgcgaagagccattaggatcaagggagcaaaacattgattcttctccggtcatgtgatttgtgcatccactatcgatcacccaacttcttccaccggagagatattcctacaagagatcaatttctagttttaggtacccacacttgtttgggtcctctcatgttagtgacaagtgccttaggcacccaaagaactctcttgatggaaaaatttttgtcccttggtcctacatacttagcaacaacacgaccactagcattcttcctaagaacataagatgcatcaaaagaacaatgtgaagcagaatcattaggaaggatactttttgccttaacaaaattgctaaaaccttggggcctctttatcatcatactcttgtccacctttccttttggtggaggaacatacccaagaccctcatggttgaagttgtccctttgatagcctaggtactcctttagggccttactatccatatggcacttaagtaggccattgtgaagaagtcccataagcttctcattttgcttttgcaaagcactcaaagaaatagagttagtagcacaagcttcaatatcaatatctttgcatctcacacatgattcattgcttggaacaattttggaacaagacggttcgctagggagagagacactattctttaaggtttcgaacttctcttcaagagagaggtatgctttgtccaagccatccactctctcttgaagttgagcgttcgccacctcaagattagcatgagactctttggtttgcttgtaaagccgtgccaaagcctcatttttctctctctccttagcaagctcactcttgagttcatgagatcgctctttctcatgaatgagcaaagcctcttgcctctcaagagttgcatattggtcctcaattctcccaagcaactcactcaagtgtggtagagattccttagttatggacttgaacaatttgtcatccataacctcatcctcaacctcatcctcctcatcactaacaagatcaacattaaatgatttgggaggagaaggtaccttaggctcctttgccatgaggcaaatgggagcatcctcatcacttgagtagtcgaagagtcttggcggtgatgaaggcttgacggcgaatgtggcgactccttcttcataacttgagcttgactcggagtcggagccgaaaatcatcccaaggtgagcttggccataatgttcccgcttgctatgcttatacttctccttcttctcatccttcttctcacccttcttcttatcttccttgatgtgggaaccatccttgaggtgagggcaatccgcaatgaagtgcccgggctctttgcacacgtagcacactcttgcagaatgtcttccacttgacttgttggagtgatgcttggaagaatttcccttgaagaagccgcttcgcctcatgaacttgccaaacttcttgacgaagagagccatttcttcatcatcgatctcctccttgctcttgctcttgtggctatcttcttcttcttcctttgccttcaatgccaagtcttacttcttgatgcttgtcgttgagctttggttgatgtattggatgacctccttggagtcttgcacaagcatgtcatgggcaagaatgtgtccaagcaaatcatgaggtgtgagagtcttgtagtccggacgctcacaaatgatggtaaccaaggtagagttccttggagtgattgctcaaaccatcttcttgaccacaacctcatcggtcatgtccttggagccaagtcccttgatctcattgacaatcttgctcaaccggtcatacatgtcacttgggctctcaccatccaacatcacaaatctctcaaattgccccttgaggatctaaaccttggactcacgaacactatccgtgctttcatgcaagttctgaagcgtgtcccaaatcactttggcactctcaatgccatccacacggttgaactcacttccactcaaggcactaagtattgcattggcggcttgagcgttcttgtgctcattctcgtcgtcctccttggtgggatcttcgggattctgcaaaacataacctttttcgactattctccaaatagatgggttaatagacttcaaatgcatcttcatcttatgcttccaagcggttaagcctaattaggagattatgctctgataccaattgaaagggtcaattaggtctagagggggggtgaataggataatttaaaactttatgcggaaactaaaactgagttagggtcggaaagtctgatcaacagtcagactatccgaaaatatcagatagtctgatgttggatcagactgtctgatccactaaaagaacactacaagaagatctagtgcacaaacaagagtatggcgcaaacagcgactagatctatagcggcacaaaagcaaagctaaataatgggagaagagatatcaccaacaatgaaattcaccgagttgttcccggagttcaaatccttgaggggattctactctccgttgaggagctcactaagagccgggtctttgctaaccctttcctcaagaggttgcactaagcactcctccttccactaaggggtatctctttccttgtggaggcgagatccggccttcacaaacttctcccggccaaccacacgtagatcggtggctcgggagtgacacctagccgtctaggagtcctcaacctccaagagtaacaaacaccacacaactcttggtcaaccctagtgctcaagatcgagtgaaacacacactaggccctcaaaccccaaatccacaaccaccaagatccaccacacaaagaacaatgagggatttgagagagggagaaagagctcaaagatccaaagcaccttagcaccaagctcaacccaaagtgaatgagaatgaaatgagttgggtaaccctagaaaagggttaggtggggggtatttatagaagccctcaaaatgtggccgttgggagagaatcttttcatcccaccttggaaagtccgaggtgacatcggatagtccgatgtttttgacccccaagcaggccagagacagagaacgaaattctggagaatttcggacaatccgatcgatcggatagtccgatgtcatatcagatattccgttattttgaaccaagaatttcatcctctcacagagactcaagttccattgaatttcggagtctctggatcatcggatactccgattacatcggatagtctgatttaaaactcactcaaaaggaataaaaagcaattcaaaacagagagtgaagttctgagaaatttcagatagtccgacgtattggatagtccgaccttatatcggatagtccgatattttttagccaacacttagacccaagacagtgagcaaagttctgtgaaatttcggatagtctgagcatcggatagtctgatcaacatcggatagtccgacagacataaaacaggaatacttcaaataaatgattttgagcactagtgttctaccaattatatgcatgtggcatccctcttaatagtacgacatcctaatactcaagaacacaagatatacatggattagaagacaattaccacaaaagatgccgcaatacttattgtgttgacatccactcctttttcatccttgcatacatctcaacaaaaagcattagttaccctctaattgtgttgtcattaacaccaaaataaatgaggggtcctagatgcactttcaggtgggttgacccgacccacttgtgctaactaaacgcttacatgaggaaaaatgagccccacatgtcattctcactcttccccctcctctctcgcctttttctctccatctctggcaaacggcagctagaaggatcacgccgccaagccaatcgagcctggatgctggtatcgcgatcgccgcctcaataacgacacacaaactcttctttctatctgctcgcgatgagggagtccatggcaggaacaacgcgagcccactaccacgcaaagcatggcaggccgccatactctagaaccaaattgcctacgacttccgtgtcgtgccatgatgcactcctcctattcccgtgagaacggatgcgtcctcgtcatcctcggccatgccacctcgcagtctaccgtcgtgctccatccccttttcgccgatcacaacgcatccacctccaccttctccccccaccctcgtgacgtgtctgggtttgaccgcttgcgctgccactgcggcatgcgtcggcatccccttgatcgtgcgtgtcgtcctcgggaccaaactgaccatgacactcgtcgtgtgcggtgttggtgaagcctacaagctataacaaaacctgtaaactgcttaaaacttgcttgcttgcagtagatggggagaaaattgggggcgggggagaggatgagagaagagtgagcatgatatgtgggatcatttttgtttttttttcccatgcaaacgcctagtcagcacaagtggatcggatcaatttgtcatatcagcgaaaccagccatctataccgtcggagggcctaatttaaccgattttacaagttggtgggggggggggttcaaaacttttggtattgctgtttacaatgtcaacataagggacctaaagggcctgtttggcaaaactccaattcctaaatttagcttaaggagttaagtttgctgtggagttgtggagcagcctaaacccacctccacctctctagttcattttgtgatagcgctccacccagctccaccccagttacactaccattttaggtggagctgaaactgtttaactgagttttaggagagatgcgcatgagctggagctgtgccaaagaagctcaaaatgaacttattccttgttaggtcgcgtgcggtttcaaaccatagtttcgaactgatgactaattagcacatgattaattaaatattaataaaaaatagaaaattcaaataagttaatatgattttgtaaagccactttattatagaaaatttggatagaaatgattccatttaacagtttagaaagcgtgttcacgatgtcaagccgatgttacctaacgcctccgttacttactgacggcatgatccgtgcaacgcaagtttcgagaccggccgaaagctgggtcgttctaggaaacttgctttttcgtctttttcttcgatggctcaaatcgatataaattaaataaaaagaaagcaaacgcatgattttttttttcaaatgacgcagcagcacatttaacagtttagaaagcgtgttcacgatgtcaagccgatgttacctaatgcctccgttacttactgacggcatgatccgtgcaacgcaagtttcgagaccggccgaaagctgggtcgttccaggaaacttgctttttcgtctttttattcgatgactcaaatcgatataaattaaataaaaagaaagcaaacgcatattttttttttcaaatgacgcagcagcaccataaaaaagatatggatgaagataagcacgtcatatagctctaacaaaaaaaaaattctctctccctctctctctctctaaaaaaaagataagcacgtcatccagcaacacgttttatactacggactcctccgaaatagccgcgcaaaaaaagaaaaaaaaaagcatcaattcttttcccccacgactcgtcgacgcatccagcgaacgcgaggtcgcgagcgtttccacgcgcccctgtccacgcgtcccgcccagcacctcgtgcgggccccacctgtcatacccaccgagagagggagccgtccagaatcagcccgccagcccagccagcctggaaggcaagagaagaaaagaagaaaaaaaaaaaggaaaactccgtgcacgcggtccacagcccaccccgggttccccctgcccccacggcggtggaatcggcacgcgaggtgggccccacatggcggcgcgggtccagtgaaccacgcctttgcacgcgagacctcctcccccgcggcctccaccaccaccccactataaatacacggcgaagggaaggcctccccttctcagcctcatcttttggttggtttcgttttggtattcccatacactttgtttctcttccccgtctcgtggtcgagagaaaccgagaggagagagagggagaggagcgctgccgattttccggagggggagatctttttcttctccctgaaggttcgagatcgatctgcgacgaggaggagcggggaatcgtaactttatttccgaggaaattgtaagatctcgcgcgacctgtttgttcttcttggtgttcttctgcctagttacttcgtttgttttatgtttgatctatagtcttgatgatctgtgaagactagttgttgttttcggtacggatggtaggaaaggtattttcctttgtttaaggaattgcaagatctcgcgcgacctgttcttgatgttctgtctagtacttcgtttgtttgtttgatctagtatgttagatgatctatgaaaagtagttattttcggtacgaatggtaggagaagtattttcctttgttggcgtcaaaatataatctttaatcactcagtcttgtgaatggtaattctgaattcatatttttcttttctgatctatatcgtgttattctgtttatgattttttgctgagtagatccccttgtgctcgatgtatgataagttatctatatcgtaatagattcgtatgtcaaaacttagtcgaaattttcgatctcatctcttctgttagccacaggtggctgattgaaatattcttcaattgagtctgaatttttatgttatatgcaaataattgtcccgctccagttcatatgtctgatgaaacatgaatgtaaaggaattaagactttggttatatgattcgagtctgaattttcttatgcttatgcaaataatagtccaaaagaattggtgatttttttgtgtagttcatatggttgataaatatgaatgtgtctcaaaagcaacgaagattttgatgacaagacaatctgctatttgagtctgaaatttcttatgcttttgcaaataatagtcatagtcagaacgaattactgaaatttccctccagttcatacggttgatgaaacatgaatgtatctctttagtaattgaaactttgacgatcagacaatctgttgcattgcctagtcttgcagattctcatcgatccttttaattcttctctgcagtcaacaaattgatgcactaatggagtccaagggtggcaaaaagaagtctagcagtagtcgttcctccctgatgtacgaagctcccctcggctacagcattgaggacctccgacctgccggcggcatcaagaagttccgctctgctgcttactccaacgtatgtatcgaatcaactgaacactagtttgtttctctaattggcggttgattggttgctcacggtgttaaattgttttcatctcttgcagtgcgcgaggaagccctcttgatagcccccttggctaccttgacctagtagtttagttactcctctgaattctcgttttgggctttcttacatctctctggctagctgcttcccagtgaccgggaaggtcatcagtcctgcttcctttcttcctcatctctggcatcgtccttcgaaacaatggcagtcctgtcagttgctgactctccaccggtctcggcgatcgggtttgagggatatgagaaacgcctcgagatcactttctccgaggcgcctgtctttgctgaccccaatggcagggggttgcgtgcactgtcacgtgctcagattgactctgttcttgatctggcgaggtgcaccattgtgtctgagctctccaatgaggtcttcgactcgtatgtcctttctgaatcgagcctctttgtgtacccatacaagattgtgatcaagacctgtgggactaccaagctcctgctcgccattccgaggattcttgagcttgctgaagagctatctctgccacttgaagctgtgaagtactctcgtgggacattcatttttcctgaagcacagccctctccacacaagaacttctctgaggaggttgcagtcctgaaccgctacttcggcggtctcaaatctggtggcaacgcatacgtgattggagatcctgcaaagccagggcagaagtggcatgtctactatgccacccagcacccggagcaacctgtggtcactcttgagatgtgcatgactgggctggacaagaagaaagcttctgtcttcttcaagacttctgctgatggacacacaacatatgctaaggaaatgaccaagctctcaggtatctctgacatcatcccagagatggaagtctgcgacttcgatttcgagccctgcggctactccatgaatgccatccacggccctgctttctcaaccattcatgtgactcctgaggatggcttcagctatgccagctacgaggtcatgggcttcaaccctgcttcccttgcctatggtgaccttgtcaagagggtgttgagatgctttggcccgttggagttctctgttgcggttaccatctttggtggccgcaaccatgcagggacctgggccaaggggctggatgtcggggcctattcttgcagcaacatggttgagcaggagctgccttctgggggtttgctcatttaccagagcttcactgctactgctgaaatcgccaccgggtcgccacgatctgttctgcattgctttgctgatgaaaacacggagaaagctggtaaaatggaggctctctactgggaagacgatgctgtcgaggagatagatggcacagagggtaagaagatgaggagctgctgatgagggaagcgcactgaagattaaagaatactcaaaactccagtagcgatcactctgttactttgtgaagcagccagccagactattcatatagtactagtatatgctatgaccaatgttctttattatcttgcatatattctgaataaaagggctctaggtggtctgctttgtctgccacagtgagcaaaatgtatccgaatatcaaactttaatgttgggaatataatacaagtcattttataataatgtcggcattgtcactccctttgtttgttccggttgtgtggtagtattctggtgatggtgggaggcgggaggcggcacattatttctttgtcaagatgcttgtttttcttcccttgtgtgatggatgataggtacttcttggcatgtctattggaccgtcaaaacatcttgcgtattggatttgcatgggaatctgattcgagtcgattgagactgcatttgttgctatcaggcaatgaattgagcactttgtacgctgatttgattctgtgtacgaacactacggcaattggcaaatatgacttctgttctgcacctatcactgttctgcacctatcagtgacccaagtggttctgcaacagggactgagacaggtacccctgctttgttgatttgatctatttcaaatgcagttactttccacgaagaaatgcttcagtgtcaatctagaaatgttgagtgaatgaatgttgaaatctgatatactcttctgtaccagtgccttctccgtgtttctgatattttgtcactagccagaaggaatgtgtcaaaataatagtataagattctctaagacaataatagccctcatgtactcgcctcaacttgagggctgaggcaatcgagagttggagcacaacattgattacatgagatagtcgagtattctcagcgaacaactgtaaattaaacaaactatgtaatcaaatgaatattgtaacaaattacaacagggagttttggtggtggtggggaggagcaatgcaaaagaatcgtcgttcaaaaatcaatttcatgtgagaaatgtgtcatcctatattatacagatgagaagcgacttcagctattgccacttcatggcaaagcgggcagggatgcagcagcagcagcagcagcagcttcagtaactgacgcttgtatgcttgttggagatgtaacggcaacggctgatctcctccttttgcatccccagcatatccggtgtattttccgtttgcttctcaagttaaatggtacctctatacagttggtccaaggtaacaaatgtgtcatcggtttgtgtcttgaagcagaggtgtcctgttgtatcttcaaagattcaagccactcgttctccaatgctgcaattgcgagagcacgctgcgtaggattctttatttggttgcccaggtaaccttgacaattttgtgccccgcaatagcatttaaccttctccccgaaatgcacaaacctgaaaaggaacgtgaactattgttactgttgctcatagaaaatcattattattcacaagactcctggaagaaaaaaaaatctttcttcgtgtgggctgggagaatagtcaccgtttcaacgctcccacataataacggtattttaatctaatacaaatgctaattggtttcataagaaaataacagaaaaaaatcgtggtgtttctgctaccgaagcatgatttggaaattcaccatctagaagaggaagtgggaagcaagtgaacaacgtttgagtggaggagaaaagataaggagaagatactcaaaacgaggtgagccattagcatacaactaattgagtattaattatttaaacttgaaaatggattaatatggttttaaaagtaactttcgtatatatgttctttgcaccaaaaaagcaccgtttattagtttgggaagcatgcgtgcaaaaaacgaggtaaattttctctctttcttgccgagtcattcacagagcccataatgtggatgtaaaagctacatgccacacaataatagtacaaaggttctagttcacacaccagaatttacatatgtacatatactccactagatatgcatatatttcaaatcatggttaaccatagctgattgcaggaaagcagtttctctatgcaggaactatatctccatatcaaaagaatgtattcattatacctttttcagtaagaatacttaggatccttaaaaatatagtttgaaaaactattgtttgcacatacctgtagtcataagttaagtgttctccaacttggatggaacgagaggcgaaaacaccaactcttgtctcaccatcaacttgcctggacaagccacatagacaatcaggaacattaatcatttcatactgttcacaaacaccgagtacagagcttttctgttccaaaaagatggcattaccatttttctaatttacagttgggatcacaactgtggttcagaaaacgtgatgtgtttcctttaaatgttgcatctattgtaaaatctttgctgatttcacacatgtagaaatttttatcacctcgccgtttcatgtcccaaagcctttgttcacatgttgcatcattgatgactggaataatgtttaaaacacattagaaaagcatttgaaaagaacagatgagcatagcattaagttgttgtaattagttatagagagaatagctaagagcctttgaatcaaacccagaaagatataatacgatgctatcccacagcgccataaaactcaactaaaaaacagtgaaggagacatactctgtcccaaaatggaagcatttcttgagaagtaggttgaattaaatggggaaaggttgcgattggttgagcagaggaagtaggtgaagaaattaaatggagaatggttatgatgggttgagatgaaaaggtaggtagagaaatagctacattttaggatgcactttgactgctagaaatagctacatattaggacagagggagtaataaaataaaaaccacaaagagctaaggtcacaagaataagtggcaacaagaactgccattgttcataattgtaggcttcgtagctatgttatgttataaaatagagtgggaacaaaatgtacactcgttatccaattttcagattaatataataagttttcatctaaagctgaggtaccttttctgttaaacagatgcaatgactaaacaggctttttcatgctaactaccaataagttgcttcaaatttatcttcaggaaatattcatgtcaagaaatttggattgtactgtaatggcataatgtgactccacaatgacatgcatacagtttactaaagaatatgctaatttgtataatataagtttaaatggtagagtaacttgtaccttcaccaacatactcaattataaaatcacctttttccaatggctccaatgaaatagcaccccatccacaacgttttgtctgtacagaaaagtagttgctgcagttacagacttattctccctaacaaatgaagaatgatggtgcccggaggtgtcaacagaaggtgaaagtaatctacatttgatggcatgacaacttcaaacagcactatcatagccatatgccattttacattaaagaacaatacaaaggaggtttgtggacttgaatacttttgagtcgttggcacaatacttctgttattagatatcatcaacgtttgaagctcagttccaagtttaggtaaaattcaaataatgtaatcagtaagttagttgttccatgatgatacaacttgtagctaaaagcacaggctcttcgacaaatgaggaacttgacaaatttgaaaagttacggcagataatatcacagcatgcaactttatatgtatgccgaaagagttacacaggtaaggaagaatgtaatggtaattgatgtccttaacgaaatcaagaaaaaaattgcaggacataattaccttgacagcttttatttttttatccttgcggaatggcttgttcgtacacatatctgagcagtggcaattcttggaacaactcatgtaaaggcccctgataaagtgcaggaaaaaattagaactcagagaaacatgtaaaaaggcaacagaagagtggtaacgagagagtggcaatttttggatggcagaagagagtggttgaaatgagtggcaaaaaagatgctaaagcaccctcagctacagtagcattagctacagcagtacagctatcaaaagcagataaagatttatataggaaaacaacaacggcaaccttcacacatacgtaacgtaatgatattttgaagaaacaaatgtcaggctacatttgattaaaacaaattggaaaaatggtatccagtcttactagtccttgaatgcatggtcaacattttaagactagttcattatatgataatgatattgataaatttggcattaaattcccagcatacataatgtacaaaaatacaggtaaaaagaacagaggacatagctacatgctgagacatgcaccctgttttgttagaagaggacattggtgccatctttagagcgcaatgaagaatttgtgcacgaatcaaactaaagctttcatgaaaacttctgtatgaaatgtattgacaaagtaagactgtttacctgcattcgcagtcatctttgcacgtagaatcagcactgcagtttgtgcacccagcttccgcgcgagaatcaggacgttttttcttgattaaatatacatcttttaaaaatcaagaaaacaaataggatatgtagagatgaaaagcagacaaagacgaaggtcattatagaaaatgtaatagctaaaggcttcattctataactgttacttaaggatactgcgtctgataaacgtaaagtgtggtggtttgcagacagctgcagtgaaatccctgatggttgaatcaatcttgaagtcttcattaacatatggaacaggtagtcggcaaaatacttcctacagaacaaacatgtcagtgtggccatgaagaaacatttcacaggcaacacacttcatcttctgaagaaaaaaaatgtttttttgtttgaatgagataacactgaaatacttttacaagggtttatagcattagtgtaacaaatatgctcctcgccaatcttcgtgaatttcaattgcactgctgatgttctttaggtgtatagtaaaagcaagtttcaaatagccctcctggcataaattaactgatgttttcatctttttcgtctccaagttacattacagcctcgctaactaaatttttataatactccctctgtttctttttgtatgacgttagttcattcaaatgaactaaccaacattaaacatttcagagcaggagtatattgtactaaaattacaaatgaacataaaaatatgtggcatcctatatatagctgcacaaatatcagccgaagtaaaaaaaaaagaagcaaaaattcacatcccaaaataccatttgtcttgtgacatagggggagcactactttagcagaattccaaaaaaacaagagaaacatgcccagaagcctataattgaaccatccaggtattccaaggtgactagctatgaaatgtgcacaatggctttatctaaaagcaattgaaacaaatatagaagagaatatagcaagaatggagttatatcatacaaaacactaacctctatgctgttcgtcaagtcagcattctgccaccattaaacaaagtagtcctgtcagacacttcaaacattacaaatattacaagaaggcatatgaaatgactatttgaagtattcttcaaaagaattagcttaaacagcaaccttttatggttttattaatttcccacaatccaaattaggataaaattttgaatgtaatggagacatcagcattgggcttgaaaccatgaaacaagtttgttaacctctggttaaaagcaagtaatagaaaaaatgatgctacacatgaaccttactaataagaacggaaccatagtgtcacaatcatttcatgtagttgaaaggagtacaaaaattatagagaagatgaagtcaaaacaattccggaaacgaatcagtgaaagatgaataaggatcgtgatagttcagtgtcacagctgcaccaaaaggactttgatgcattcatgtgtgattgcactagcttgcttagcctaggaacccagcgaataccagcaatgttatgataagatggagaaaaaaagaagattaagacttttcacttataaaaaagcattaacacttctagaaaaagaactaatactgtaaataacttctagcaagatcaaacaatattatataagcaggataagatgagttaaaacagaagagaggttaaagcgacaagaaagaaacttggaaaacatgtcttacattcactgagcacaagtgagaaaataattatatataaagacaatttgatatccatccaaagcagtaattgtcatcgacattaaaataatgcagcatacagtaaaacaaaatagctttgttgcacagataaaaaaatgaaaatgaacatcacccaaggagaaaaaagtatgttccaacaatttagttttaatcttacacccatttttttcttgaatcttgagaacatatcatattgtactagatttttttttggggggcatctagcaacataaagtggtcaatcttaagggtaaaaggatagacctcattttgaaggagccaatcagagggatgcctccaacagatagcacttccttggtcatcttttaaatgaattactggccatggtgcacattttgtatgtgctgcaaccgtacaccgtccacaacgccaaaaaaacatcttttgcttacagaccatacagccctgattggagataaaattaaattaatgcaagttcaagtaaaactatcactattaatccaagagcaagaagtgaaacataacaccaaaaaaaaacagagagagaaaagaggtttataacataacagcaccatggactgcagcaactctccttggctacagacaaaacactctagggaagcttctagaaggacaattgataaatgtccaatactctacttttaacttcacaaattacttttgtttgggcagctaccagtgagctctgatttgttttaggacatgaacatttggaaggtattctccagcaccttaaattacaacctcatttgaaaaagaaaaaaaaaatctcctgtgctcttagttgaaaaaatagccttccatgccttggcatgtggtgtgaacacatgtgaatatgtgatgcatggtcggtgacttgggacccattagattgaagttttctccattaaaaggacaaaatagagcaaaattgaatgtttagggctaaaataggatattttaaaaaatgttctacaaacaagaccagctcaaagttagaagatcataattaagtcttcacttttaaatatatgttccttcccccacacatattgcataaatttgtactgcccagctggccatgaacatgtgatagatttatacaattaaaactacacagaatttgactcagtattaatatactccttccgtcccaaaatataatgacatctagagttgggcatgggtatcaagcagaaaagtaaaataaactgagggatggttgtgattggttgagatgaggaagtaggtgaagacattaaatgagagatggttgtgattggttgagatgagagagtaggtacaaaggtagctatattttgggacaattattgaatgctaaaagtagctatattttaggatggtgggagtatgtattacccgtaggtgtgatagtatatactgcatcccttggcctcaaaacaataaataatgcacagctgtactgtctgtacattgcatgaaagtaacaactatccatgttatgaaattaaataagatggccagagaagcctacaaatttcagcagtggatttttatttagagtggttctttagtaaaatcttacatgctcccttatgtgcacgagagacttagcacatactagagcacactccagttcataagatcggagcttacatgttgagggcatttgaagctttcagcaatgaaatttgtggtatcttctgctgcacaagtcaggtggaacaattctccacatctactaaccgaacactttatttcttctccaggatgaataatcttagaacataatcgacattcaacctgtgcagagatgaacatggcatgagctgctaagcaaacaaaaaaacaataacaaaaactagtgctgatgttgatgtaagcctgcttttactgcaggatttacacagaatttcataggaaacagtcccttcattaatcaatttgacatttgtttattaatgagctgctgttttaacaaggcagacgcacataaaagtttgataattattaagtaaggatgtaagcatcaagcaataatagaaacctaggtgtcagctcatacaatgtttccagaactccaaccaggcatttcgtaaacattcagaatcggacacatatctcagtcctactgttggcattgagtgcagttagcagtccgaatgagggaaacaaaatgcatgaggaaactcctcccaaaaaaggactgattcttgcaccaaagtgaccaaacattacagcggtattaaatttttggttttttaaactttaaaatgcttctgcttgaacattacacaaatttgcgtagcggaaacacatgtctcagcacatcataagtatattagcaacatcaagcatagccccacggataaatacttcatgcattctagcatttctgtgtcagccatcaaacatctagtgttagcactactactttttatccacattatttctgattaccacctgacagaacacgaatcgtatggaatttgaagttatcaagatgacaagacatttaatggacattgcacgcacaccagtgtgggaggacccaaaagtgtcaaatttatgtgttcacctccatactgcatgctactgcagtgctactcccttcagtcaaaaaatattgtccttatggactttgtagggtataataaataataatacagaagaatgtcttatgaccaatctacccatatcattctaatgtgataataggaaatgcttaaaatacatggttgttcaaaattcaaatatacaaaaatccgagctcgtgtggtctaatgtttctaagaatttagaactagaggaaataaaatctgcaaaacacaaggacacaaccaacacattcaaaacttcaaatgttctaatacgttttcaaactgctgcattacttatctaaaaatgtattaccagtctaagcatcagggttacaattttttctcacccacatggtatatattattatctactcaattttgcccctgtaaaccactagatcacttctaaagtcataatttcactcgtcatgcccacgaagagacagttcagtttgttcaaacaaaagttctaagtaagctcaagcatctgttactacatcaaagcatatcattacgagcaaaagaaaaacgcgcaccgccttaggcgtgccggttaggaaaggcagctcgcagcgtccggccggcacgccgagcgccgccttcttcgccttccactccttaacgtactcctcgaacggccgacccgatggatgagccggcgcggtcgccaccgtggacgaaggcgacggcgcggaggacggctttttcccgcccccgcggcgcggggcggggcacgcggggacagcggccgcgcccgcgccctcgccagcgcccgcgaagctgcgaactcggccgctccatcggcattccaccgggagaacgggcgcgccgtcgccaccggaggcggattctgcttcccccgccgcctccgcctctgccgacgcagacaccgccgccgcggcggtggtgacggcggcggcggcgggctgctcgcctgctagctccccgccggcggcggcggcggtggaggggggttgcggcgagagggggaggcagacggtgctcagatctggcatggcagcgaggcgggaggggttatgggctagggtttggagggcattggaggtgggtggagtcgtgcagaagggggagaagggaatggggggaatggaggtctgaattggggaagaaggggggagcccccgcgcggccgcgcctcgcaacgtttttttgggggtgaaaattttttcgtgagtgaaaattttccccgtgctgcttttgcagagtggtccgcttgaaaattcggaattcgtttctctcaaacttgcgaatagacccttcacttgatatgaatttgtttttttacttcacctacaaacgcgggtgctcggagcacatccgaaagactgactagtatatcttgagattgataaagacttactagcatcctacacctagaagcacatccgaaagattaaacggcatattttgatattgacgaagtcaccacaaatgcctcgatgttgacaggtatatcacctattaatgaaaatatttaaccgtaaatacaagcattcatgtttagtatatggctcgaatttgggtaagctagcttgatcacaaggaatctaaccatttaaactatactcactttattataaatttctaaccttactaaattcaaattcaaagtgtacccatttgtgttttttttacacgtgaagatttgaagtatgttaggttgagtcatgtactaataattttatcatcacacctttagtacttttactgccattcttttttttagcgctgctctcacttgatttgcaacatatcaaaggataattttcttttcggacgaaataagatgaatttttttgacaaatttatattcgtccttcaataaacagcaacatttacatgtagccaccaagtgtccttttgatcactcaaaagatcatcatttgagcaagtttaataggatagccaactactagctccaattcaactatagccaatccaatagcttattcatacaatagttatatactacactattaatacctggtcccacttgtcatacacacactgtctttgaatccgtgctacagctggctacaaatatatagcccgctactcctctttcttctcatttatatttttaaaatatgtttacagctggcttatagcctcctactgtacctgctctcaaggctgctgatcgctgacagaccgacgagcgcgccgcaacaacgaatagccgttggatcggagacatcgacggtccagatcgaccgatcccctccccgccttcctcttctcccccctactgcgttggtagggttttacgcctcactgcccaccgccgccgccgtcaccaccgggcgcggccgccgccaccatgagagccctcatctccctctccaagctcacccgccgcctcctcccctccctcgccgtcgcccgcgccccactcccgcccctccgccgctgcctccacgcggaacccccaccgcctcctcatcacgcgccgccccccgtcgcctcccggatcctccagtccgagctgaccccgggcgcgggcgcggacgcggacgcggagcaagaacagcagccggcccccgaccccttgctcgacgagttcctcgcgcgcttcgtcgccgcgctgcggccgaccctcgccgcggcgttccccacccatgcccgccacgtgctcgacgagatgctccgcctcgtggcggaggccgtcctgtgccgcctcaccggggtcgagccggaggagggcggcgccgtcgagctcagcgacgacctctgggcggcggtgtgggaggtcagcgccgccgtgcgcgacgggatgcagcgggaccgggtccgcgccgagctccggggctacctccactgcgaggaggtgaaggagatgacgcggttcgcgtcggacgtcggcatccgcggcgagatgctccgcgagctccgcttcaagtgggcacgggagaagctcgaggaggtcgagttctaccggggcctcgacgacatgcgcgcccaggccgaggcggccgctaaccctgtcgcgctcccgccgcccaggctcgcagccttgccgcagaggaagggggagatcaagttcaagatacatgggttggacttgtcggacccaacgtggggtgaggttgtggagcgcgcggccgaggctgaagcgcattttgtgccacaggaggccaagccaatagaagggaaggcgaagaaggctgaggagaagctgatggcggttgatccgaggaaaggagacccggcgcctgccatggaagagtggaaggaggagctgctgccgaaacgtgccgactggatggcgctgctcgagcgtcttaaagcccgcaatgttgagttgtatctcaaggtgatatatcctttacttgaaggctctactattgtgccttatgtatgtcatgctagtcaagtagattactttcaggttgtaaaattccttgttctttcatggcacatcttctagttttaggtgcttttgctgctgcgctaaccgctaaaataccctgattatgtgatttcttggtttgatcagtttgaagtgtgcttttgctgctgcactaaaatggcctgattatgctttcttaggttgaccagtatgaactgtgccatttgcatcacattacttgttgacttatagtatttgacgataaaggaaccatcaatatatgtaatagtctttctgtatcagatatagctcactttcaccctctccaaaatgcatcttctgaccactaattttgttcagcgttttgttgaagattttaaacaataagatgtgttatctgatatttgttcatgattgttgcctatttaggaatagtgcaaatgttgcattcgtctcccattgaaatcctaagttttagctactagcataatcagatagactgctattacatgtccagctttcccatgattgagatagttgttctgcaccaacttttctctgtaacctatgactatttcagctgtatttaacgtggtcaggctagttcacatggaaatgaaacttcaatttgtggacaattggcatttaaatccattatttttaaattgagggagtactttgcattttgtaaagttggccaactgccactgagtttagaaagccttcagccatccacttacattgaaatctcttttgtagtttcacatgtatgctgtgttgtaatttacaggttgctgaaattctgctggctgatgaatcctttggtgcaaccattcgtgattactctaagttaatcgatcttcactctaaagcaaatcatgtggaagacgcagaaaggattctaggtaaaatgaaagagaatggtattgcacctgatgtcgtcacatccatcactttagtccacatgtattgcaaggtggggaatcttgaacaagccaatcaggcatttcaattccttaagggggaaggcttcccaccagatatgaagcttttcacgtcaatgatcagagctcatcttaagtctggagaaccaaaacaagcagaaaatttgttacgtgaaatggagagatcgatcaaacccacaaaggaactattcatggatgtaatcctggcatttgctcagcgtggcatgatagatggagccgaaagggtgaaaacatcgatgttacttgctggattccagctcacgccagagttatacacatcacttatagaagcatatggacggggtggtcacgttggccaagcatataccctgtttgagcagatgaggagttctggacatgaaccagatgatcgttgcgttgctggtatgatggttgcctacatgatgaagaaccaactggaccacgctctgagcttcctgttgaagttagagaaggatggacttaaacctggagttaaaacaaaccttgtcttgctggattggttgtctaggttgcagctagtgcaggaggctgaacaagttgtgcagaagattagaaaggctggagaggaacccctggaaatgcatgttttccttgctgatatgtacgcaaagtcacaacaggaagagagaacccgcaaatccctcaagattttagaggagaagaagaaattattgaaggcttatcattttgagaggattatagcaggccttctcgaagggggtttcacggaagaagccaataaatatttcaaaatgatgaaatcccatggctttgttccatcaccaacaattgagattggggtcaaggctagttttggggttagggggggtgttcatccaactggtaggcatcgtggttaaggctttgtccgttggcagtgatcagctgccattcaggcactgattctggtttgaaaatcttgaagtagcactgacgacgccatagccaattctgtcaactgaagcggcaaaaaaaatttccggcttcaattggttttgtttgatctgatatcagatgtcttcattttgaagatgcctccatgaactatggattcatacaagtagatggccgcttgtcctgttattgccgggattttttttcctcatcaattgtacttgcatgctcacacttaataagtcttttagtcactgtaacgcctggatatctaggttgtgcttgtgccaacaatcggatttatcttagcaaatatcagttatgacttacctgtcataggcatttgtcaccaaataaatgtttacattttaatgaacaatgaaattatatcacactgtcaaattggtgcagatgcactaatgcgctaagttatgagcattccatcccgtatcagcctgtctatgtatatatttattctgttcttatggtaggtagtattggagcaaacacgatgtaaatccgtgtaaaaaaacgcggtgtaaatcttgagcaaaggattcgtagaatagagagattagacaggcgcaccacactttgaatcaacattcatttttgaaatataatacattaggtcaagttgtgtggacgtgggattgtgggaagtacaatcgtaaaccatgataggcacaaaaggaactactgctatgtttgaacaagagcaataaggcaacggacagataaaagcaaaactccctccatttcaaaaatatatgacgtattttgttccgttagggtaaggtttgaataacaatcgctctactcggacatcatttatgcgataaatgaagcataagcataagtacgaacttttgaagactaatataataaattcatgtcacaaaacttatatcctaataaagtattttttggtcaaatatttatcctaacgaaacaaaatgtcttatattttgaaaaggagtatacagccaaatccttcttttattcacaaagagacacagcagataagtttaactgatatattgggtaccagaggcaacccattgaaatttaagttttgtcagaatatgagcacacaatgtgaaactctcattgttttacaggtaacacctctgacaaccatggccacatctcttctcgctggtgagagatatcgaactgaaaccactcactaccgctgagctagcttcttcaagtgttggaacaacttttgctttatccactgtcgatcatatggcagaaatgcctgaattgagtgatcataactgcaaatgcagaaaaaaatagtagctgattgttttttactttgaaaactatacacataaattaacattgcacgattctgatccaattctttaaaagttattttactcacactagtgcactgatgtcagctaggccatcaatgaagttatagaggtcagtgatatcatatgttatgtttggtaccattgggtttatgtccctaattttcctttcataaagaccacacagtcctgtcatttcagaagagagctgtggtgagtaatttacaaagagcaaaagtaaaataaatcaagaagcacatttgaagaaatgaaatagttccgattataacagagtagaatggatacatgtcatgcatcaaacgggcacatagcagatcataaataaaacaatgttttaaacagaataccaaaaaaaattgataatgtgcagctgaagaacatccctctctcctttctgaaaaacagccttcaacaaataatatgtaagaggagagtctagtgccataaatcctgataatgtctctaatgcactatatgcaaatttggacgtttgcagtttatatggtattgaactttcaagttaatttttctaaacaaatcgatcacatgagaaaagtgaattcataaaattgcaagatcatatcgtactcactaggaccatataaaaaaaatatctaagctattatctaagcattgcatcattagttaagctttcaaaaccgtacgtaccatccaatgcatggttaattgaattataatccataaatgttctagaagccctgttttgggatggttgcatcagaataatggtgtgcctcccagcctgcacaaataccaaaagaaaaaaaaagattcaatgcatgcttcaagtaacaagaaagaatggtgcaatttgatgatactgcaaacatgccataactacagagtgttcaacaaattcctgaaaaggtaaatatttccagagtatccattacctgaaatatatcaggctagtactacaaaagcgaggagtcgttatactaaatagtaatatgatagcatggtcagcatcacaattatgtcaaccagaaagctttattatctaaagacagtgattccctgataatacaacaaccctatccaatgtactgcttataaataaaaaataaataccatcagtagcacaaaccacatatctttgcttaaagattatagtatttaagcagtggcggagggctcggtagggcgaggtgtggcgctcgctatacctcacgccacccgataaaccccccaccccccacactttctccggacagcagggcgccgagccgcaaagagcgcggcaacgccgctttggatgagcaacatgaaagggcgcgaggcgctgcgtgggtgcatccgcacgtacgctcaccaacaggtagcaggccaagctgggcttgtttcatgtaaatgtttcttttgactattaaaccctagacccaaattcccccatctccttcacctccatcgattctccaatccggcaatcctcatcccgaccctaatccccatcggcggtgcggctgctgcctgctggagcggagtcggcgcacgagagggaaggtggaggcgaggaggggcgaggccgccaggctcccgagcggcgggcgcagagcggcggcatccgcaccaggcgccagcacagcatggcactgcggcaggcggcgactgcgagctatcaggaagtgaccagccagccaggggtgcagccatgtatcgcaggcagggcagagggcgccatcgccagcacaggcgcacagcagccagccagccactaacctctgccaactagccagccagcagcagtgcagcaccaacaccaagcatagcaagcaagccaagtcatcagcagaaaatggatagaaagaggaaagggaaggcattggcatcacaaagaggtacatattgttgacaatttaagaatattacaatttgcaaattcaaagtgtacaaatttgtttctgaaattgcatttgtgtaatttgttttgcagatttgaagagttacttcaaccggggctctagtagtagaaacccaagtacaaagcctgaatcttaaggagttgagatatgttttagtacatactcttctatttacacttgtttgcaaatggatgatgaattatgaacttgtgattagtgcttgttgccatgcttaatgtagacttgttgagataatgttgtgtcgtacaatatcatgcgttgagattttttttttcttttattcttgttttgtgctcgcagtagtccataggcccccgggccactgtatttaagcaaaccacatatctttgcttctatcaaaaagatagcaatggtccatacggcactacatattatggttttctatatagactattgctacaccaccggtaacttctgaacaatacaaagctttaacatatcatatgcacaaacatctcgatcagtacaacatgcacctgccattaagccaaaaaaaacacacgaatgcccaaaccctagaaccctgtgggaggaagggtgaagattggggggggagaacgggtggcttaccatcgagagcgcgggcgggtcacttgcgacggacttggagaaggcggcgcacaggtagggaccttcccgacggcacaccggactcaggaggagtcggcgcgcaggtcagaggaggtggagtcaaaagcggtaagagaggaccgctccggagacggaggaggcgagctttggggggtgggggggcgagaagagctaggtacggggcggaggctcgccggaggcagctctgagcggcgtcgagttcgtcggagtagccggcggcggcggcggcgtgtcggctgggggatttcacgagtcgcgggggaggggggaggggggagagcgtcgagcggtccgggtcggtggatggaaaaggagaccaggtaggagacccaatcctcgcgtgtgagttgtgacacgttcgcagcacgaatcttgaagcatcaaacttactaataagtgttgccctgttaaaccatcgaatcaattcttgtggctctaggatttccttcctcctagatttcctttcgccctgttgccagcattaagagcaaggataatagtatagctcactttctactattagcccattttaaaaccaacatatataatgattagctataagtttggctacaactttcttcttctctctctatctctcacatatgcatttaatgtatttacctaggagcatgtgttaagctagctcttgcatgagagccaacatccttgatttttttgttatctcgtctccacataagcttatagtaggcttatactccctccatctacttttgatagtcatatttccaaatcggaaaattctatttttgataggcatatttcaattcaacaacctattatcttaatgactttctcggatttaatgtatgactctccattctttcacacaagattggctaattgagcatcgtgaaatgtaaatattaatgaatcgcttgtttacgaggaatgactagtagcatgtttaaatggatgataagtagaattactattatacttgctctaaggcaagatgaaatattggtctgtgtgccaagatgaaatatgactatcaaaagtagatggagggagtagctcactattatacttgctgtaaggcataagtaatggtgtgacgttatcatcttaaagaaaataccaacatgatttttaatggcgtaaaagattgggaaagagaaaagagaatggtgccattctttttaacatactgataggcaacataatactacaatcataaagataatgctccctgtctccctccgtcccaaaatatagcaatttaagatcggatgtgacgtatcttagtactatgaatctgaacatgccccctatccagatttatagtactaggatgcttctaatccggttctaggttgtatattctgggacgaagggagtatattatattaggaattatcaatatatatctatatatctatgtatgacgtgtaaagtttgttgcaatagattaaaacatgatctctacattcgatatggacatacatcatgctctaaagttcttgcaatggtcttttgtcgcccaatgccaaacctgccgcctgctagtggttgtgcaacagtattatgtggttttgtaacgttagatgagtactcccttcgttcaataaaaaaaagaatctaatatagaatgtgacacattttattttagatttgttttttatagaacataagtactcttgtgatttgtgaagtaaaattttcactttgtaaaaaatccagagttatagccaaacgtagttttacctaaaggtctgcacgtgtcgagacgatctaagatctaaaacttggtagtctcgaaaaaaaatgtacgttcatatgtgtataataagaaattaaaagtcttgtttgccataaagcctgaaactatatggatctactaggctgaaactacattaatccactagacagaaactatatgattctactaagggaattgacagaaactatatgattctactaaggaaattgagacaatgcacatttcaaacaaagattagccgtatgcatctgttccagatgtagaggccggttttttcttaaaagaaaaaaaaaactgctaccgtctgcattacgccgtaacaacatttgcctctagtcactcgtgacctcatcttttcatttatacttatcagtcaaaatttaaattttcaaccttaaatttagagctaattttgagattttttttcattgaagtctatttttcaacatttgctttattcataaactactttcgtttacaaatatatcgtttggcttatttcataaataagcgaaacaatgaggccatcagattcatgacacgcaagagcgcgaaatgcaaacagtacgaattcccatatcctacctcacagcctcagatgagaagataagactgcattgacaggttaaattgaaccaaacaaatctcgaataaattgtcatgagattggctggaagaattacatcagatctcaactttcgactaaattatgaactcagttgtacccaacgctaacaagtatgcttgccaacacgcagcagtacctgttacaagaggagtagccgcgtaaaccaccatcgaggtattgttacggtgttatcagagctaaatctatagcttttctttacttcattatcagtcatctgaccttgcaaaaaaatacagctcacaaaaagctgttcctcaacttcagtgttgtagtttctcgaactgaaagggcaaaacctgccaactaccgagtaacaaataaccaatgtaacattcccagttaggacatcagtaataaggtagaagttggcctagtcaaacttgcgacaaatatttattccgaggatagaagtttgctgcacgcgtcgatcttagcaacatgtgagcccaagatagcctgacctgatggatttgctttcatgattttcatcatagcttcaaacactgcagcacgaaagaaactgtcctcaattttctttagagtatcctcaacgacttctatgctcaggcaatgtgacaagaccagccgcccaataacttcaccaaaatgtactggagcttttggaaggtcaatagcaagctcatcaagaagagaactgtaaagcaagcatccagtttccaagtcagtcgctttgaaaacattcttgttgtagagatgctccaacagcctcaaaagaggatcgatggaattggtgcctttatcaagagcaagattgatggcttctttaacaacttctgggtagtaatcaggactcttcagctcctcaatgcactgttgtgcttcatgtagaagaagtatgtggaaatactccttaagaagagatatggtcttcttctgaagctctgtagagcttggcttgggggcagcagctggttgctcaactataggatctacagatggagctgggatgagtgattttggtggtcctgtagtttgagatggtgtgacaaccagaccatgggatagtgggccaccactgcccacaagtgcactcgtcttgccactaattaatgctgcactgccttgaggaagcagtctggaattattaggtgatggcttattggccaatgatggggtgaggttccgaactggatcagctctgggctttgatctagaatgcggaacttcccagtcatcactacctagccctggcattccaggcatctttctcgctccaggcataccaggcaacatgccaactataccaggttggttcatagaaaaagctcctggtgaaaggggtcctccacctccagtaccagtacggccagttcttatgcttgcagtcgaccctggacgcaatccaagattgttttctgcctctctatgaatttcactgattttcttagctttcatctgagaaagaattaacagaatctcagagcaattcatatagcaaaataatatcatattgctttgatagaaacagtaaaacagaatccaagatctaaatgtttatcatgctcagtgactactagaatgagtgccactcggtgtattgcaaaaggtacataggacttgaagtgaactaatgtcaggtagaagtattgtaagcgtgtgaaacagaccatcatgactaactcttgtggtgtaaccatgtatatattaccagggcaatacttgggcaatttccaaaaaacaatgcattcaaaagactcaacatagtatctcaccatatatatgaaggttcttagtaatctaatttggtttcatttctgttattaataaccactgcatagctattagcaactagtagagagtactgggcagataaaaattctggagagtaatacaaatataaagagaagttgaggacctgtacctcttcacgtcgaggcacccattggtttgaacgaagatcaaggacatcgcgtgccatgaacctcaatcgtgatgccaactgagaattagttgttagatccttcagccggttgaagtatacgtcattaaatcgtcgagactttggattctcatccaactgtttaccaattgtgttgaagaactgacagatggcctccacattttcctcagcagggcatctgttgctttcagaacctaatagctcctgtttacagaaaatgggtaagaaaatatttagttgataggtaaatcaataggtctgtaaagtgcaaacaaggatgtcttgtgtcatcaaatgaagggtgttcaaacaaactgataaaaagtcagtcttaacatcccgattaggtgcacttctggcacatgcgtattcttgacttaatgattttcatttgatggtatattcaactaaacgcgaaagattgcatgcgcacctgaacaatgtgatgtactatcttctcagggaccattttttgcttaagtagctcaccaacaagacgaatgtttccaagtgtccgaagcttcactagcctttctttatcacgtctctccatctcttggtctagaccagtcaatttattgacctcagaccgcagattgtcagcaccttcaaatgcttcttggcaattgttcaacagcacacgtttgaacgtgatctctttaccaccaggttcttcagaagggaatgagggtaacttctcattgagatcaaagcaaagctgagcatacattggacagaaggtaggctcaagaacagccttctcaaatatgagactaataacatcctgaaacaaaaacagaccagatgtaaatcacaaggaactgtcgaaaggcaaagccagttgaatgaacaacaagaacataccttcaaaatatcagctgtagtgatccctgcttcaattaactggcccttaagaagatcaaacttttctggagtcaatttgttcagtatactgtgaaacaaataacaaataaatatatgcaagaaaaaacataatgtttggttactctctccagccacaaataaataccgctttggacatcagtacagtcccaaaagcaaaactatgacaactaatttctattaaaggacatcaataaagctcgatatagtgagttctccacaagtttcatgtgtcaaatcaaaatatttaaagaagcattagtgctcaacattcaaaaggtttggctgcaggtatgtctaaaacagcacattagggactagacgaaaaagagtaaataaattatatttcctaaatatgaaaatataaaaatgatgaggaaggatgatacaaatcaaacaataccctttcactgttttcagaactctttctttgttggagagattgcctctctggattgaccaagggacttcagccttgacaagagcaggagccggaccaacctgatgtttaccacgaatgagaatgttagataattgtcgtgtatcaaatcaaaatgatcagattacttttgcatgtagctttacttatgcagcatcagcatacagccaccaaagcaaacattctagtaattcgtaattatacatgccaaaattatagtatgaatttgaagcaatcatttcacttggtgcattgacagatgtctaattgcctccaaaggactagaattagataaagccataaagtccatacatcattgcgttgctatgatgtaattcataaatgcaagaattgccacaatatcaatcactacttgcaaccaggtatatgataatgtgcacccatcacaagcgtatattgccccctcgatggaacaattttctaccaacaatatatatggcacaacaacaagcttaggagttaggagcaggtgagaaaaagttcagcacaataattgtaaaaaaaaaatatattggcacatatgcagaacaagagagcttagaagacagcccattgatactcttttatcctcaagatacctgagcttttgcactgaactgggagctcaatttgtcttgattattaaattgatcttgctttccacttgaaatgtatgattcttttgcttcacgaaatttgtcccaagatttctcttcaccaccaatagcaggagtttgcacaggttgttcaatccgtgaacgccaatcacggttgtctgtctcagcgtagcggttatatgactgagtttgcacctgccagatatgataaaacatcaaacaggtagtaatcagtaaacgtgaaactgcaccagtcttactgagcagatacagtttgcaacacataggaacagttgaaaggtaaaggaagagttctcacacttgagtcattgttaatccagggttcatcttcaccatggagttctatgtcaatatcttgcttaagcttcaagatgttctcaggtatgtcgataatctgcaaaaccatagaatcaaagcatgtaattggaaagatgtcgagggaaataaagcagaagacaagaatatttggttatgaatacaagaaccagtggtaactgttgcaaatatatgttgttttatccatttaaacttctctgaaacataggttgttccacaactttgcttcactcctatcaatgttacaattaaaattcgagtggttttagaacagaattactgcaggagagtccattatgtatgtaggggaaaagatttagcatgattgggaattattcaaggcacaaaggccatttcatgtacaacttagtcattgtccataacacaaaaatgatatatatgtggaactgaaggcacaacatgatggcatgctcaacttccctttacagggaaatgaagagccatagaacaccagaggaaaactaattttgttatacaagtttcatacatcagatagcagaaaagatcaacagaaaaaataaaaggagacagattttctgagtaccaaagtcaatttctctaatcattttgtcatattcaacatagacaagtgcaagcaactgaatcacccctaaagcttgaagtgaattttggatagctagattgttatctcacttccaaatcttcagttctcaatgcacatatattaaatataatatgtaaaacgcagaatatgtgcaaaacaaaggtgagcaactgagcagtgtgtttcataaaccaagcaaatagattcagtgaaaccgcactattggtttatcaatatttcaaaatatgagcagctccatcattatagaagacagctatactaaatgttccataatgattaatttcatcatgtgaaatacagtaagtaaataagtagcaacagataaatacctcatgcagttcaacaagttgatccctagtgtaacgaacccgctcgagaggttcaaaccgcaagtctccaagctgtaacagattcggcaaatgccaaccaagcagaggttaataaactatatattcatatctggtggctcatattaaatgaaccagaccagaaacacagtctagacaaaatgcatttgaaacaagccaacaagttgcaactcaagaatctcgccatttgattggcccagcggagcatgtaacgatctaggatggattgtattctagctaattgttttctttgggtaaaagttctctaacactgggtttattgcagttagtacaaactacaatatcgaaggctcgaagcctcttttagtttgctgttagaacattgagggactttccctgtgaataaagcgaagggagaagtgcaattgttggggcaaatagaggggccgatttgctcctccattcatctacattgctttttgatttgcacagctagttgttgataaagagtagaagcactgcactaagaatagtaaaacacactcttttgataatgtcaatcattattgttcacaaatgctatcagaaatacagattctaaatcaagtatatccttcaagcaaatcaaaggggagtatcaaaccaaaaaaccagtgaaatgtcacacccatcagccagcactcgcaatgcaccccgcagaccccccccccccccatatgtccccttccgcgaggatcgaaccctaggaccatcacccccaccatccccaaatggagcggtctcaccttggcagcgaagccggaggatgcgccgccgcgcgggcggaggaagtcgagggagcctgtggaggcgccgaaggggaagaggcggccggcgcgcgggccaccgatgccgccgccgccgcccgggcgcaggctgatcaccgcctgatccgcctgcgtcatgatccgcctatcgaagaagagaggcggagagacggaggcgcggattgggggcggggtagggttgtatcccccagaggcagaggcgttttagggcttttgcgttgcggcggtgcggcgtcgtgtggtctgttttgctatgttggtggaggggtagaacggtctttttctgtaggttgtgtcactgcgctgctcgccttctcggagggcgacgtgtcgggaggacgaacatcgaggacgaaaatgccgtttcggtgctggaaatgacggtattgggtcggggtctccgggagtgcggggaatttcactgtgaatatacacccgggacagattttttttgtagtagtagacggagtaaatacgaaattgattagaatttgttaagcagtgcgtgcacatctaaaagtagggtttactcttttttatctttaaataaataaatttatgacgaggttaatatatcatgataatacaaacctgtacagtaaattgtatagattaataatattaaaatatgtcgtatctcgtattagattttgtttttgttttttttaatatagagagtaaacggtagagagattcccaacggtagagagtaaaccgttcagttttgtggacttcggctttatatcgaagaagttttccagctgcccatcatccaattgctcttatctatgcattcatccacttacccagacgtggagccgcatgtagggctatcatcgagctgagctcgaacgagcttgcctgccttggctcgagctcgacacaagctcgagctcggctaggcccacgagctcgaccgagtatacaataatgtatattttgatgataaaatttagtaaaaacaataattttaattaacaatattgaagaaaaatattatgagaactcaagattaatatatgatgccaaaatacactaattattcatttgaatagatactaatttattctaaagttacacacaattaggctcgtgagaagctcgagcttggctcgacaaagctcgcgagcttgtagctagactcgggtttgactcgttaagagctcgagctgagcgcttgagacgctcacgagtctcgagcttttttttttacaaccctacatgcaggcatcacgcagaaccaacaaaagctagtgggcccatagagcaagagcaagaaccacacatataggcccagatcgcgggagacgaggcacccgcagcttgcctctctcagagcaagttcaatagtatagctaactactagctccaattcatctatagccaatctaatagctcattcatacaacagttatatactacactattaatacctggtcccacatgtcatacacacactacgtcttggagtccgtgctacagctggctataaatctgtagcccgctgctcttctctctcctttttttatctccttaaaatatgtttgcagttggcttatagcctgctattgtacctgctctcatgcgcacgagatgttcggtatcttcggtgaagtcagttcacagcggacaaaaaccgatctatacatggacaccgatatacataaaaataaatgcaccaaatccaaaaacgcgaaaactagtaattcggttcgattcggtgttcgttttatttgtgcccatacacccctccaaacattttttaatataaattgtgagcgtgttgggattaaacactagacctcgggggttaaaaccacatacccttgccactgcactatcatgtgaattgattactacttcggtttcaaccgctatggactcatcggaaccaaggccatcaccaccccgcatcgcttgagcgcacagaacccctctacgtggcggtgcatgcaacaagaaaaaaaaaggtgagacgagaaagagaaagaacgagagggatggagaagcgatgagaggagaggagaaacgcccatgcgagacccccaaccctgatagtcgccagcaccgccatctccgccgtcatcgtcatcggccgcctccgcaaatcgaagcttcatcgttcaccatcgctgcctttgcctcgcccttcccccagccggcgatgggtaacgaaggggagagagggagattgctgaaacaagaaatatacttcgcatgtggggcccactcgccacgtcggctaagaacagactctatactggttaggatctcgagtataccagttttgtaagttgagaaactcattatatcttgtattgcagtttcgaggacgaaattcgaactcagcaacgaagaagggatccaaaatgaagggctagtttggtttgtgaccaatgttggccttaccaaaatttggcatggcaagttttggtatgtcaatttttggtaaggccaacatgtgtttggattgaagccaaattaaactaatttggctattgaaatggcctatgttacataggcatgtcaaaatttggcttcaatccaaacatacacaattattgttgaggttgccaaaaaaaaattggtaagcctaatttagacctcaaaccaaactggccggaacttattctaaatagcaacgctgcctggttctgtttaatttaatcatggcctcgttgcctcagagcccaattacaaggcactaaaggcagtagggttcggtttaaggcccccagccggaaggcctcgtcaaaaggctcaacacgtgccggccgcgaccggtgcagtgcggcggcaggccgcggcaagccggcaacgcgccatatctcatcctgactcggatcctacgtaagacgatgattttacttagagcaagtttaatagtatagcccactaccagctccaattcatctatagccgatctaatagttaatttatacaacagctgcttactatactattaacatatgatcccacctgtcatacacacattgcgtcttagagtccgtgccgcagctggctacagatctgtagcccgctgctcttctctctcatcttttatttcattaaaatatatttatagctggctaataggctactattgtacctgctctttgctcttgttccgtcaagccttcccgtggacacaaagacacgacacaaacctcccgaggagcaaaagcaatggaggcagctgcgctaactacaccgacccactactacccctcttgcggctgctcgaacggcgaaccactactatgtttttgcatctacttttcccccatgcgagttgcgaccaaacgcagccatatgatcgatgcagatgcacgtccttgcataggtaggtgtaaagccgccaggccccagagtagtttgctcgatcttcgaatcagccgtgcgatcgtgtgaaaatctccgcatgattcacgttggattttgcggtctctggatggggtctttgattgacactttctccgtgcgcctttggtcccggactccctgtccactgcaactgcaaggccgtgcgaagcacatcatcggttattacgatttcgtggcgccgtgacagtgtacgtttctgttggctatgggcctgtggctgtcggtgtaccggtccgggatgctgacatcatgtgaaagttcccttttaggattgttgtatgcagacatgcagtacttgagtccatgtttctctggagcaaccatcattctaaacattattagcaggctctaaacattatgcacgaatgaggtaccagtagcactaatcgaacacctgcaacgcaaagacgtcgaacggatatccgttcattttcaaatcagacagctttgttacttgttagactgggtcagagtacaggtttgcaggatgaaaggaacacggcatatggcagcagtatggcactgagcacacgttgtacgttccggctctctgccggtgtcgcggcgtcgcattcgcatacctcgtcatctgaagctgatcgatcgctggcttggtcagagctagtgagtaattggctacagtattaattactgtagcacctaacctaaacattcgtcagaagatagcagcttggataaggatttcgcaccagtcgacgtcgcatcgccctcgcccgggagcgacttttctttctacgcagaagtgtttaggttcaaagtttttcttcaaactattaactttttcatcacatcaaaactttcttacacacataaattttcattttttccatcacattgtttcaattttaatccaactttcaattttgacgtgaactaaacacagccttcgtacaattataccactaaccaataatcttatactatgaaacgttcagccgtaagagctggtctgtgcgtgcacacacgagccttgctgctgggtcatcaccgcatcagtactatgtatcagctggttcaacgagacaactaaaatttactacatctatattttaatacatgacgcctttaactttttatttaacgtttgaccattcgtcttattcaaaaaaaatttatataattatcatttattttattgtgacttgattcatcatcaaatgttctttaaacataacataaatattttcatatttgcacaaaatttttaaataaaacgaatggtcaaacgttgatcgttactgtttaaccaaaagcgcgcctggtagtatttgacagcagcagcgatcgagctagtagtacccgccgtacgtagtgccacacgtaattcaccatctaattcgcgtcatctaaactccaactgccccatcggtgcagctgaacagagcagtagagcacgagttggacaaggatttcgcaccagataaagctggacgcggcggtgacccgatccatagttccatacataacctgggtgcccgaatatttgggaaacggttaactcgggtttgcgttgtcagaccatgtgccgagcagatcgtacccagcccgatctcgccttgaactcgctgcatttaagctggggaaaaatctcagattgctgctgtaagattaaccgcacatgcaaatccaagcaaaattgttcgtggaaacgatacagaagatgtgacagtgtcaccggagactgatgtattattgcatagtctcaaagagattatcagtccgatcgtttcgtttatttatttgcaaacgaaaaataatttacaaataaaacttttatacatgtgttcttagcgatttaaaaacaatactgaaaataaactttgatgaaaacctcccaaaatcaacttaaatttaaggttaaaaatttatattttaactaataagtataagcataaacgaaaagacaagtcgttacgtcaattcgccaacaaaaaaacacgggagatcgatcagtggatcacaccattttccaacgccggtgggaagctgccgctgctcctgtttgtcattagggtaggcccgcgtgaatgatagatagtactaggaaggaagctgtcatcgctgatgcggcgaagagatcatcatcaccgccgcgtccattgtccggtggggtggaccgcgtccacggagacggaggcctcgagccgtcgagcgcagatggaatcaaaccttccccaagccaagccaggaaaatccgatccacccccgacctcctccgctttcacgcaggtcatccatcccaccaactcctcacctcttcctcctccgaagcaatccaccaccggtcaattactggcataaattccaaataaaatacttattcaggttgcatattcataattccttatcttttaaataatgacacggtttactatactcttattatgatatatccaataaataaacatatttttatttttattataacattttgtaagacaaatctatatagattgttttagtgtctttaaactaaatatttttgaagttattaatagttaaagttataaaagtttagcttttaaaaaagtcaataattatgaaaattgatgagtaacactgctactccttttctttttctttataaaagtcaagaattatgaaaattgatggagtaacaccgctactctttttctttttcttttacttaaagaaaaaggaaaaaagaaatatatgcgatattggcaatttggcatcccagcgacagctataaaaggcgctccacccctcgttagctcaccagctctcccccaagagctgcttacctaacatacttttacaactccaccattgtccattgccaaaggccttcgatctcgcctcccagatctgccccgcgtcggcgaaggttggttggaatgctctctgttttcatctcgtttgcttgcttggatgtttctccccgtttgctggtttgccggcgaggtgttcgaccgattgattggttgatcgtgttgcgtgcgatgcgagcagatgaagatcaacgtgcgggggtcgacgatggtgcggccggcggaggagacgccgcgggtgaggctgtggaactctagcctggacctggtggtgccgcggttccacacgccgagcgtctacttcttccggcgcggcgaggcggcggcggcggagggcgggagctacttcgacggggagaggatgcggcgggcgctggcggaggcgctggttccgttctacccgatggcggggcggctggcgcacgacgaggacggccgcgtggagatcgactgcaacggggaaggcgtgctgttcgtcgaggccgacgcgccgggcgccaccgtcgacgacttcggcgacttcgcgcccaccatggacctcaagcgcctcatccccaccgtcgactacaccgacggcatctcctccttccccatcctcgtgctccaggtatccaattctcctccattttttctcctcacgcgtagtaggaatctactattctatttctaccgccaccaactcgatcgcttgcctgcgggcgacgacccggtcagcgctcatgcaattcaattgctaggtgattagtggctggctgcgtcatgccaacaattttcttttcttttttggaccctatcaagctctagcttagaccgagtgaagcctccattcatggtgccaaattgccgaccaacctacctatgtgaattatcgaaacacgtatgaatttttagcatttgtaggctttttttaatatagggatttttcattaatttattcctggtatgaatcgaaaagaaaaaaaatcatacctgttgcagaaaacatttgttagtactggaattttctatggaaatgattagctttattccttagaaatttcctggaatggccacatcagctctctgtttttataggccttctattaatacatgtctcatgtcaacgattatctgagtacggtaatgactaatgattggcctgcgcacagttgaaccctgtcattagatcccatcaatttggaacatatgaatttaaaagatcttttgcgggaaatttaaaagaaattgtacagcatgaaaacaacctagccgtgtaattgtttggttagaaccatatattctgacagctagacaagtcgaaaactaccctgagaattggggaaggtgttctacctacttgagtccgacttctcgctgttgttgtgacttgcgagctatcatcgtttcttttgtcaaacatgaaagcgaagtagcgaaccaattgtttgataagattgccagatcatatttgtgcacagcctcacaattgtcacaactgctccagttggtacatcatcagcatccacatgggtgaccccctgacccggttgagatagagtgagcttaagggtgtgttatagttcctgaaaaaagttggaagtttgaagaaagttaggagtttgaaaaaaaagttggaagtttatgtgtgtaggaaatttttttatgtgatatgatgtgatggaaatttgggaatagggggaaactaaacacggcctaaccaaacaacaaaatgttagttatttgctggacatcttattcttcggatgcacgacacatgttggttgaaagacaatgatgtaccagctagaatgtaaaaaataaatgtttctttgtctttgctttgtgctagcaagcaaaccttaatttgattgatcgttccatatagggggtgtttagatggggctaaaactttttagtacgtgtcacatcgaatgtttggacgttaatttgaagtattaaacatagactaataaaaaaactaatttcataaatgagagctaatctgcgagacgaaatttttaagcctaattaatccataattatgaaaagtttactgtagcatcacattgtcaaatcatggcgtaattagactcaaaatattcgtctcgcgaattagtccaagattatggaatgggttttgtaattagtatatgtttaatactctaaattaatatccaaatatccgatgtgacaggtaagtccctgtttactaaacaagcccttagtctgcccttaatcaggttctccagctgtatattttctgtctaggctccatctatgatcccataattgagttcaggcaggtaaggtggtctgcaacatccaagttggcttgccatgaccgagaccttgagtattattctaagcaatcattcgctcatacggagtacacgtttagtgggacagaggaagtacgttgagatacaagaggtcaaatgaattgcttctagacgattggaatttaatatggtaacgttagttgaactagaggtatcttagtgaaacggtaggtgcaataaagaagttgtgttttcccttaagcacatggtgctgtgtgatctcgtccttttttttttccactctaataatgctcaggagattaaagaagtctcggtcacgtataactctgtaaaaagaattttgtaatctttgtgaaagaacagagcggttagttaaactttggcgccattttgctccaggtgacccacttcaagtgcggaggcgtcgccctcggcgtgggcatgcagcaccacgtcgccgacggcttctccggcctgcacttcatcaactcgtgggcggacctctgccgcggcgtcccgatcgccgtcatgccgttcatcgaccgcaccctcgtccgcgcccgcgacccgccggcgccgtcgcacccgcacgtcgagtaccagccggcgcccgccatgctggcccccgagccgccgcaggcgctgaccgccaagccggcgccgccgcccaccgccgtggacatcttcaagctgtcccgctccgacctcggccgcctccggtcccagctgccccgcggcgagggcgcgccgcggtacagcacgtacgcggtgctcgcggcgcacgtgtggcggtgcgcgtcgctggcgcgggggctccccgcggagcagcccaccaagctgtactgcgccacggacggacgccagcggctgcagccgtcgctgcccgacggctacttcggcaacgtgatcttcacggcgacgccgctcgccgaggccgggagggtgaccgggtcgctggcggacggcgcggcgacgatccagtcggcgctggacaggatggacagcggctactgccggtcggcgctggactacctggagctgcagcccgacctgtcggcgctggtccgcggcgcgcacacgttccggtgccccaacctcggcctcaccagctgggtccgactgccgatccacgacgccgacttcggctgggggcggccggtgttcatgggccccggcggcatcgcgtacgaggggctcgccttcgtgctccccagcgccagcggcgacggcagcctgtcggtggccatctcgctgcaggccgagcacatggagaagttccgcaagatgatcttcgacttctgatcctctgaaatcaaacaacacgtacgtacgcacgcacgaacgcgcacatgcatggagaggaggcggggtggttcttaacacagcctatcatcggtaggatgcagcaacgattctttgattccacacgttagttcctgcaaatttttcccttcctgccttcccgcttttgggcaggacacattttgtgccaactgtatttgtattgtgaacagttaattaatccgtaaacattacgaaacacagagggttaataaggttaatcacggtggtttacttcgcctatcagtttctcaagtacagaaatcgcaatatgcaggattgtctgcgataccgcatctgcaacagctgccgctaacttgtggaaccgagtttacctgtaattcactgctactacagatataataccgcaaaggacccatgtatcttacaaacagaaatggtcttcgtacccaactacagcattccaagcgaggcccaaatgaaccacatgcatacgtcatacgtggccacgtgcgcggccaacgtggcgatatgggaccggagttaggctgaattccagcggccagcgctcaagtcacctatcagggcgtggaaaaactggaggcttgagggagtaggttgagaagacgtgaagcaactctgagggaaggagttggtgtttggtggtggtcagtaggtgaggattggagtatggacccgattcattgcgatttcgtagccgtcgtatctcacggattatctggcaggtgtgtgcaagtgtggaagcaaccaaaagacttcagctggataaaaagggacaagggaagcactaatcacttgggctggtgagaatgagatcaaaagtgtcggtctagctcaagagtcttggcacgtagaactcgtgctcatcgtcggtcaaaatggcaccaaatggtagagccaatttggtgtaggatttgtaccgcaaggtacagggtgagcagtaaggtagaactgttttcagacaacgtgcatctcacttgtcttattaaagaagatgcgtccttatcagaataacagttattgccctgctctcttgaccatctcaatagtcgaccaaacatcatgctaaacccggatgcagtacagcagacaaacagtagtacgtgggtatatttgtggcagtacacgtgccaatgtggtccaagtggaatcaaccgattttagcgggaataaccgatgatctttgtgtttttagaacgcaatacaaacgaaaaccctcacaatacagacacacgcgcactctatccctattgacatcttaaaaagattatgctgacatatcttgagattaacgaagttaccataagcactcatgtcaaatctagtacatgaatccaaattgattggttccaccacaagaaacctaatcagttaagctgcgctcacttcgctttatctttttgttgctcatcattagataaatgaaaacaacaagagggcaactcttggctccatgtgtaagggaggataattggacaaaagtgtgttgcaactcattggctccattgttgccttcatcattgccaccgtaccattaattatttttagatcaaaggctccacgcccagctttactaacaaagcataacaaggttcgatacagaaagcgaaaaggaaaagataaagaacagaaaaggaaacatgacacaattggggttgccaacttgaaacagaagtacagatagctgaaagtgactagcccctcacacagcccaggaaactaacataaaggcacacgatgcatcgcctggagccaaaaccatgttgctgacttcgctatctccctacactatcttcttcctcgagcaggaccctgagatcagcctggtcttccctcttccagctccttgattcgagcacgcagcgagtccttgaagggctccacctctccagaaaatttctgtgccaccaagggactccactgttgcagcaacattaccaccttgtgagccatcaaagtaatgcccgaaagacatttattgttaaaaacaaaatcattcctcacaagccaaataacccaacaaacagcagagaaaatgcaaatgtagaacaaattgctcttatgccaggatctttaagtttctcaattagctcatttcttgttcggggcacataactccaacctaagatatctctcagacaacaccaaaggaatctagctggtgtgcacgcaaaaaacaagtgatccactgactcaacttctccacaaagcttgcactgctgatttccaggccatttcatctttttcagttgttgtgctgcctggattctccctttcagtatgagccacatgaaaatcttaatattaagaggaatcggagccttccaaaattccatcattctgctatctctcacgcctccaaaggtcatctctctgtatagtgatttagcagaaaatacaccagatttagttagcttccatctcatcttatctctccccccattcatttggaactcctataacaactcctgcaactctgttcactcttctaactccaactctgtcaaggatctcctaagatttatcacccattcacctgagttgtgcacttgcttaactgtttcattatggttggagcacgctttataaattgcagggaaagtaactttcaaaggcgcctctccagaccagacatcgttccaaaaactagttgaattcccctcaccaatttcataccagctccctagcctcaaccaatgtttcacagcatgtaaacctttccaaaactgagaaccaccctcttgtctagattgaaagaaacctccctccccctcattgctgcaatacttcctgtgaagtagcatgcaacaaagatcatcttggccagattcaattctaacaatccatttacaccgcaaagctgcattcatcactctagtgttaataaaacctaaccctccaaactctttgggtctgcataaagcttcccatttcaccatatgatacttcctcttattctcaagaccttcccagaaaaaacgaactctaattgagtccatcatctggtgagtagtttctggtagcaagtagacacccattgtatacataggaatagaagtcaggaggaattcaccaagattgctttccccccataagaaaggtgcccacatttccatgtcgccagtctcttctctagtttatctggggaggctgcaaaatctgccactgtcaatctcactgagcttatggggatccccagatatttcattggaaacttccctctctcacaattaaatttttctgctattctttgggcttcagcatcatctactcctatcacgaaaacctcactcttttggtaattaattttcatgcctgacatcgcctcgaagcaatacagcaagaacttcactgttagaatgttttcttctgtgttctgcaaaaaaaggatcgtgtcgtcggcatattgcaagtgagtgagccctccaggcacaaggtttggaaccactccctctaagtgaccagcttccttggccagggtcaacatttcagaaagggcgtcggcaaccaagttaaataacaatggggatataggatccccctgtctaagacctttctgagtcttgaaatacccatccacctctccatttatgtttatggccactctcccgttcagagtagctttgcccacccattgaatccatatctcatcaaagctttttttccttatcacatcaaacaaaaaagaccattgtactttatcataagccttctcgaaatctagctttaaaatgatcccttctagttttctaacactcaattcatgaatcacttcgtgtagaatgaccacaccatctaaaatgtatcgaccaggaataaatgttgtctggcattctctaatgattttccctgcaactcttgacagtctgaccgctaacaccttagtaatcagcttaaaagcaacattgagcaaacaaattgacctgaattgtttgattgtattggcattcttaatcttcggaatcaaacttatgaccccaatagttgagcctccaaagatctaagttcccttcaaaaagagcatcaagcatttctttaaattgcatcttaagttgtccccaaaactctttcaggaaactaactggcagtccatccggtcctggggcagtgtttgataccattaattcatcatgccttggtgttagaggcggcaacagaatgggtcgaggccgaattggaccggaatgaccccatcccagaacccacaactggaggaaatgatccccacccccgccagggtcccacaatttgcaccttcgcgtctttgagtgtcgttcgccacgctgactgttgagcatagtatcttgagcttctcctagtgagcggtgtggaccatccatgatggacatgctcctgtgtgggtgaggggatagttggacaagcaacactaagggaggaggatggcaggctggcggcatggcatgaccatgcagaagcaacactcacagctagccgaaaccctcatctgcgggcaacgagggagcatggtccagaggaggacaaatagtggcgcaacatggttgtgtgagagcaaagagaaaactagcagatgatgacatgactatgggactgaggggaacatccgccactttgcgtctttgcaactcaacttgttagggcaacaaagtcaaagcaactggcaacgtgcaggtgttgcgggaagggatgtggggataaggttgggatgagtagggcttttccttgggttattagtaggattattgtcttttgcaatggacttgtagaatgatccaatgtaccttaccgttttagagactcgtgggtgaaaacaaaaatccaccctggtccgcaaggagttaagcccctcctcgacagacctacaggtgaaaatttgccttatccccgtacgagcgggtacctggtggggacttaaccccaacagggcaattgccatctctacttagtgttgacttgaggtggcgtggtcttgtgatgtcaagtaggtaacatatcatttagttaattgtcagatgggcatggtgtgctttagcttgcttggatgcgtgagcgatgtttaacacacatgtgtgccatggacttcttttttattcatgtgagcttctttttttgtgtgttacattgtaataatcagttgtagctcgttgagcaagggtcggaatattctatttcattatcttaaaagaaaaagtgtgccatagactggttttcgcgtttgcggcactgaaacaaaacatatgaccctgtttacctgttgcttctcttggcttcctgtcctgtcacccccggcgagaaaaaggataatatgccactccatttggtgggtttagataaaatgccacccaatacattgcaaaggataaaatgccactcagtaggttactttcaggatattttgccactttgagggattttaagaccaaaatacctctagctgtggatagagaggaagagggaggagcggaaggttgacccggacgatgctcatgctcgccggcagcgggtggcgagcacacggggggcgggctgtgacatgcagacagggggaggaagatggcggcgaagagggaggaagacgagaactgcaatgggggaggaagacaacgacgcttatcgggaaggacgacgacgacgatgggggaagaagacaacagcgatgggggaggaagacgccgacgaagagggaggaagacaacggctgcgacaagggaggaagatgacgactgcgatgggggaggaagacggcggcggtgatgggtgaggagggcaatgccgacgggaggagggaggaggcaacggcgatgacgtggagggctctccagcgctgcccgcacgtgcgctcatcccctccggtgccacctcgcgcgcttaccggcatcttattcctctccttgtcgccgctagcgggagcacagacggcactcgttcttccctcgtcgccgcccgctaccggcgaccacggccgccgtcgttcgactcccctctctggctctctctcccttcctctctctctccatagtaggggtatatttgtcttaaacctcttcaaagtggcaaaatatcccaaagataacctattagccctatttggctaatggtatagggaaatgatttcccatccattaaaatgcatctttaaatcctagccattcattctccctctttcatttaatgctaacccttcattcatttctcaatctcaatctcacccccattttccattatccaaacacactgattgagtgacattttatcctttccaatatattaggtggcattttatcgaaatccaccgtatgaagtggcatattgtcctttttctcctcaccggctaagcctccagaacagggcccatccacttctccatagaccggacccatcaagcaggctaacaaccgaaccggccaacccctgcctccttccagaagcgcccatctctattctcgacccatccatcccgtccgtccgttcgtccgtccgagccggcgccgcgcgagttatccccgtgccgtgcgcgctgctcgactcgacgatagccagcgagcgacagcgtgcagcggccaaagccaaactccgcccccctccctccaatcccccctcacccatggctgctctcctccgcacggccgccgcgctcgcgccgccgccgtctcccgcccgggatccgcgccggccgtcctccgccgcctcgtcgctcgccttcgccaggcgcgcggcggcgcggccgctccgggcgcagccgctcctgccgcccgcggctcggcgagtccctggcttcgtcgcgggcccgctgctgcggcggcggccgcgggtaggagccaccgaggctgacgaggccgcgcagacggcgactgaggtgagaggggcttgcttccccatcccccatcggggggtgatttttttgctgtagcttctgtaaatcatgctgttactttgttatccgatcgataagcagttagttttgaagagggcctatcagatttgtaattttgtagcgtatcagataaaagctagatagcagtgcttggttcagaaccacaaattgctcatccgtaggatacacaagttttgtgtattagtaactcttttaggtcatggtgtggtatttgatcgcttcatactagcattttctgcacgaattgtttacgagtagtatctaccttgtttgtaccatatctcatttaagcttatgtatccatcgaattaatgcgaactggctttagatgcaggaatcttgtgggtggttttatgtttagttgatcagctttttctatatgctattatgtcaattaacaaagaaatcccattctgtgctttatttgggtgatgcaaaagttctgcactacctatgtgaaagcttggcttatcatgatggatgataaaatgattgaatttgaccttcattggtagcttcaggaaatttaatactcaatgtaggatttttgtttcacctgatttaattagtttggtaaaattctaatggaatgccaactaaagtactttttcctgacttctaatggttcacattctaaagtaagttgcttttcttaatttgcattcagcataaccatgtggacctcaagctggtcaagataaataaatgttttatttagcttagccattgtgcagtactccctccatccacaaaagttagacatatttcacatttgagtttttccaaataagttgttcctatttgtagtcttcatgcattcaatacataaatgaagagataaattaaatgtttgattagaacccaaggagtcatttaaatactcattggttgcatgcttgcattcactacttgattttgtaacatccaagatgatttaatttctccttggttttggtgacaaaagtaatatgtgtaacttttgtggatggagggagtatgaaagttggaaggatctgttctttttcatgactaaggctggaaatagcaaagttttgctgatatgggattatttccaatctattttgcatgtcattgatctattggggaatcacatttggcataggtcctcttttaggaacttgtacatcagtacttgtaagtgtttgccatagttgttgtgtaacttcagtattatgaatgcattttagctgtgccttccacacttccctgtgcttacacgtgtgaagatgctattttattttctcaatgtttcctatctttggcccatgtgtattttgcaatcgagttacttgataacatggagttattgcattgttgcaaaaatcttttctctgactctttactagtcacatttagctatcctgttctatttccttagattctgtaagagcaaggctagattatatagtaggtcagtaatgcgaccatttcattttccagtttttaacgcgagggcctgtgcagattatattataggtttatagcacaagagtgtagtgcatctctttgtcaatatttgaggtaagaaactgcattctgctgaagagtcgtataaatgtaatactgacagttgttgaggtggcatgtagcacagtagcagtatgttatttcacttccactgctaatataaaagcaaaagaagttgacccttgtcaatagaaacacttggcttctcatttagacatcttttttgatgtcacaggaggattctgaaactggagaaactggtgcagatgatgccgctgcagccacagaagaaactccctctgttattgtcacagcattgcaatcatacaaggaagctttgattaatgatgatgaaacaaaagtcgctgagatagaggactttttattctctattgaggaggagaaaaattctcttttgagcaaaatcagtaccttaggtgcagaattgacaactgagcgagaccgtatcttgaggataagtgctgactttgataactacaggaaaagggtagaaagagagaagctttcgttgatgacaaatgtgcaaggggaagttatagagagcttgctgcctgtcctcgacaactttgaaagagcaaaaacacaaataaaggtggaaactgagcaagaaacaaaaataaacgacagctatcagagcatttataagcaatttattgatattctgaactcactaggagttgaagatgtggagactgttggcaaaccatttgatcctatggtaagcattgttagcagcacatgacatactaatccagttaacttttgaatcaaacacttatttactcaaatattgaaatttccatgtctcttttaaattttgtgccttccatggttttgggtgataagtctactataaagggctggatatgtgtaggaatctattttattttccaaaatttcttgggttttcaaagggtgttacttttcttaataagaattgtttgtgcaccttctgtttcagcttcatgaggctattatgagagaagaatcagtggagtatgaagaaggggtcatccttcaggaatttcgtaagggttttaaacttggggagagattattgcgccctgctatggtcaaggtgtctgcaggaccaggccctgaaaaacccgtgtatgacgatcctgcgatggttgaagatagtgtagcacctcaaaaggtcaaggaggctgaagatgatggttttgatgatgataatgctgagtgatggggctttattttttatttcacaggaaaagtccagaaattttgatgtttttctggaatgtgtcaagcaggtaataggatagagttagaaatttgactcaaaatttcccccttcctgctgttgacgctgagtgttgatattgcctcaaaatttctgtttcctccgcgtgtggtcaattgttatggttaggaaattttctccgttcatcgagcagttgcaatgataagcagaggtaaattggtttttgatcggttgggagtattggagatcatgtaaaacaacagtagtagagaattcgatcagctcttttgttttttcttgtttccaatatttgctcttttgttttttcttgtttccaacatttcgctgcaaaatacgggcctgtacggattttaaccaaaataaaccttatgatattttggcaatgccaaaattttggcaggatggtaatattgttaaaattttggcaggatgacaatattatcaaaattttggtaggatttcttatgtatttagcaaatctagcaacaaactgaacgtagacatttttttaataacttaaaaaagatggtatggttgaaaatagcatcaaagggctggtttggtttgtgacctaaattggtcttaccaatatttgtcaatgctaaattttgacaagttttggcatgactaattttggcaaggcaaagttgtgtttggattgaaaccaaaatagactaagttaactattgaaatgacatattttcttagacatgccaaaatttggcttcaaaccaaataaacagtaaacactattaaaattatcaaatattgataataccaatttatgcctcaaaccaaaccagcccaaagtaaacacgccttacgtttccttgtcttatcttctggttaaccactagagcgtgcctggtgccttgtgtgcttgtggactaccagtcactcgatgcaaaatacgtttccttgtctatcttctggttaacccctaaagcgtgcctggtgccttgtgtgcttgtggtcttgtggactaccggtcactcgatcaccatctagaaatttcccagtccagtcttgtaacctgccatcaagaatcaggctatgcacttgatttcatgggaaaccttaaacaaaaacagatgatctccagtcttgcaatttgccatcaagaagcaggctatgcactggatttcttgagaaacctcaacaaaaacattaaacatatatactcactaactcacatgctgtccttacatagtagacttgtatcctaacggtgacgtagtacttttgagctgtcctaggatggtactactatctcacatgcttgccgcagcttttttaagttttaaatctgtcgagaaatataggatgcatctgttcgcttttgcggctgctgttttgcagtagaagcgtatcggttcgctgttacagcctaaatgcgaaccgttattggtagtgggccctatacatgtcggaatctatctacggccacgcatctggagtcagtgctgacgagcacacaacacacacaggcagacaagcagaggcaatgcatcagtttacagaagatccattaatcagctataagcaaaacaatggaattgctgatgtttataagcatcaggtactgctgaaaagcaacagcgtctgcaaaacgatggcgccctgtcttgaaacaaaggcatcattagcagagttgtagcaagtgacatgcttgccgcagcgtttaagttttaaatctgttgagaaatctcttgaaacaaaggcatcatttgctgagtatatagtagttagcaaccaagtgacggtgaagaatacatggcattactactagtagactttacacatgtcagtatgtcacgaggctcgtgaccccaggatgtctagtgtgagtcgccccaggtgacccaagtagtgtgccgtcgcgacgacacgaaaattccacgagcccctcgtgaccgctctgccttcgacaacgagatggaaatggcggcggcggccgtcggcgtgctgctgccgttcccgttctactgggcgctctggaaccacccgcagcggtgggtcgacctgtgcggcggaggcggcggcggcgtggacccgtgccgccggatggcgcaggtgtcccacgtcctcaaggcgctgcagctcctcgccctcgcctccgtcgcctccttctcctggccgccgccgctctactccgtcgccctcctcgccgtcggccagtacctcaatttcaagtaagcgagatatatcccctaaacccctcttccgacagtcggacgcgatgctatcccctcgcgttcggatcgtctgcgactttctagtttctatgtgtgttgtgctaggttttcggtgtaatttatctgttcccatctgtgatctttccatgatcaataatccactaattgcagttcagcaccaaaaatttgcgattgtataaatctgtgttggtcgtttgtcgatttagtgctgcagaatcaacagtttgctgtagggacaagggatgagtaagggatgggacgattttcaagcaggaacaacgatcatctgcttctatttaccaattattactgatttatgaattttctccatgatttgccagaatggcatctacaatacacacacacacacaaaaaaaaaaaaacttatagctggagtataattttaaaagcacaagcaatgctctcatctaatatgaaaaaaaaggggccaaatttcatcttaagttgatgtgtactcataatgctctataatggactgatgcatctattgtagttgtcccgttctcgttcagtatttgttttgcattttaacaatatcatttttgctatagtttttgtcctaaagccctatcttccttaaatgattgccataccttgaaataagatagggccttcaatattagttataaacatttagaattgtttacaattgttagcgatttagacacttagtgatgcaaaagtaagttaagtgtcatagacttaacagtgctaatccatgactcattgagtttgatacctgtgaagccactaccctggggattagtcactgctaacttatttttatgctaattcctatgcattctatgttggacttctagcaactctttacaccagtaggaaatagtctgaggtagtcgaggaggcactcaagctccaaaatttgtttttattctgattttaacgtctctttaacagaataaaaacactttcctataatcttgaaacggccacttcggcaacacatattatttgagcatttggtaatatgagtatagtacacaacagtttatagtagactaaattctgtatttatcacaaagacggaaggggtaatcatcattcagttagttagcttgtggctgatatatgtgatttctcttcagggtgtaccagctgctcggtgagccaggcacctactacggtgttcgatttggaaagaaaatcccatgggtgacagaatttccatttggttatatcaaagaccctcaatatgttggcagcatgctcagccttgtggcactgctttgttgggttccattccaatatgttcttctctggtgcctcggctacgttttcatgatgtgggtggaaagcaaggaagatcctgccactcgtgccaagctgctctcctgatcacttagctgctgttgaatctgtagcaggctgtcccttagctgttcttcttggatgcctctctgacaatgagtgaaagtctgaacttgatcggttggttcaataaaaagtgtgtgccatatttttgctgccaagtgattacagccgttttggcgcatcatatttcagagctaggtatatgtgctatactgtttcacagctatattgcagaattcgccggccagttcacgtacgagagcggcgacttcttcctggtcagcaagtgagcaagaggctggaggccgaggagatggccgtcgctgccgccggcttcccggcggagcgcgcggccgttgtggaggacttttgccgccgcgccgctgccattgccaagcactcgttctggaccggcgttactaccaggagcacgacggggacgacggttactctgactagtgttaacatggagaccgttgcagcaggttgacattcactggattttgtacataacttttaattaactgggtttcaaattcactgaagcggtagtcaaatgtctaggaagcatgatcagtgatacaaaaaataaatttccgtttagttcacagtcactgtacatcaatggaacagaatgggtccgtacatacgcaagcaagacgtaaatttcatcaagatcatatactacctagaagcaagcaaattaacatggttttatacagggtaccaaattcatttttctaggacgcacgttctagatggacctcttcctccatgacgcaggagagcttgtagatctcgtagggagggatgcgtgatctgcataggatgacatccacgcacccagagtcatcactgcgacaactgtaagctatccctcctgccacacgattaagctcaggtcctaattgaggatcgcccccctgcttggtgatggagcagctacgaagcgtgagacgcatcggaagcacaagcttgagagcgatccgcccgatcagcgcgaactcctgcacgtagcccatgtcggccttgatcctcttggagttcgaggagcggcagagatccacgaggctctggagtacggcgcgccaaaagcactcccttgggtcggatcgcatcagggcgatcaatatatgcatccctaggaatgacccgttcaggacggatgcgatctctttagctgtagccgccagcgctgggtgcgccggccctgctggatcattcgccgctccgcgaaaggcgagcgccttgaagtggtaccagtactcctccttggacatcttcttggttctgattgcctcctccgtcgcgccgagacccgccttggtttggtcgtattcgctcgtgacgacgaccttgctcccgtgagccattggtaggacccacgctgtctcggcgaattcgatgacggccggtgcgtcctctagtatgagcagggacctgttccgggcaaagcgctcttgccggacgatgttgtgcaccgcgtcgaggtaaatccggtgatcttccaagctccggcttgacgtgtcgtccgtggcggcggctgcgcccgctccagcggcgtgtaggggcagcagcacttcgtcgaggccgaagcgctcgatcaccgcgaagtgcgcgcgcactctcgcgtcgtgggaggcatcgtgtatgagggtgctcttccccgtgcccctagggccgacgatcggaaggacgccgacgacgtgcgcagccgcctcgtcctccttgagcaggaacgcgacgatccgctgcttctcgacgtgacgcccgatcggcacgcacctctccgtgtccacgctgaccctccggggcacccgccggtaggtgcccagcatctggaggaacggggtcacgttctggaggacggcttgcagatgggcgagggcgcgggcgagggcacgggacgagtcgtcgtcgtccctgctgctactgccgagcacgaggcgcaccgcggcgccggcgctggtgcgcagccgcttggcggcagcgccgcgagcgtcgtcttgctgctgcgcctggatggagacggagcggtagcggaaggtgtccagcacgtagtagccccggtacatgctctgcgtgagctcccggagccacaggagcagcctctggctcgtgacgtgccggccctgtccctcgtcgacggcagcgtgcagctcaaggagcagcagctggagcttctccaggtcgtcgtcctccaccacgccggtggttgcgcggctgcggtaggagcggatcagcagggagacgagccggctggtcaagtcggcggccagcgccggaaggaggagctcctccacgatcttcatgatctcgatgactgccggccggcctcagagaagtgatcattcacatattaatttgctatcgactttgctatctgtaaacgtcgatgcacaatgtcagcgaaatcaacatcgtagtattgtatcagaaagccgcaggaaggttcgcggttgttcgttcgataatgagtaattttcacattagaccatatattttgaccgaagtttcacaattaacaagtgctaaaccaacattttcacttaacaccaggaacaagcgagtatttgcaagtttaaggcggcagtttttcagatagttcgcaaggtaattgttaccgaccaaaatcaattagttgccaacctaaataacaggtcaatacataagctgaagtgtcaataaacacaaaatccattcccagtcgcatgcgagacctatgcaagcatgtggtgatgaaccgcaacatagaaatgagctgacgacagatatataagtcatatggtacacaacagggtaaaaaacataagctcgacgggctttactagtgtagtcactgcaactgcccatttgcatttatcagcaattgtttctttcagttcagcgccggcgtctcttatcataatcatcgtcttcttcatcagaatcacctttctcacgaaacctaggattcttctcctgcaaacataaccacgagatattttgtaaacatattgtttttccgaaggggtagtacaggaaaagccagatgacacgtatgcaggctctaataccgaatcaatcgcatctctcttgaactcagagtcaggtgctctttgcgacgatcgctcatcgttccggtaacgtttccgttggtaatctggtggcagcacaccagattgtgttagctattagttcaggggaaagaaaagaacaagaatatgcgagatgtgcgacctctgtcgttccggtaagaatctccataccctctcttcctgtcacctctgtcatctgcatatttcaaaaaatgccaagatttgtgaaaatgatgaaatataatcaggaacatgtttggacagaagataaacagtaaattgattggacggtatgctgccaaggattgaatcaaataaagcagtgaaccaaactctcaaccaacgctttttggtggcaaacgacaaggtaaaatgcagctaaagttaacaagtgagatcagagtcaatagtggaaaggcacacatggtcaccagagaaaaaggtaatgtctaattatgctttactagaataaaaaaaggctacattatgcatgaatgctaacttcatgtaaatatgatcggaccagttataaagcaaattgtttcaccataaaatacttccaattgaaaaatatatcaagaggccacacatgcaaatctctaacaaagcaattactgcagttaataaggttaacacaaatgaaaattatacaaggatgtagttaaaggcttaaggtacagtcctcaaaactttcagcacttacattgaggtggtgcattaggttgaaaagcacctccatagtcaactaactcacgttgtgcttctagctctttctgaaccatcttaccatagccacctcttcgtaagattcattaaggaagtagccaactcaacagaaaaaacatagcagcatgtaaaggcatacaaaatttaaaggagcgctattaagaaacaatcagcagatagttgaattgccatatttaggatggatctacaggtaacattttcatcagtatgaactaacacggatgggtttctgagttaccagcataaccccgctctaaatgtaataaatggtaattcaatagtaccaaaggatatcaggatcgtagtccgtgcggtactcatcccttacctatgaaaaaagaaacatgaactatcatcaaaaatatggtcaaatgtcatacatttgttattcatgcagaataagatcatggtaatacttgtccaccactccgtccacgaccccattgtctgccttcttcaaagccccaatcaaaatcaacacgaattgggcgatcatcaagcattgttccactaatatatttgaccgcatcttcagcatcctccctggagtagtacctgaaaggaaggaaggtattataacgatatgtaggctaacagcacatacaccgttggctcaaactagataaatgtcatttttacatcttccaaaatccaatataaactaacaacatgcccgatgcacaagacaataaagcaatatatgcctatcagagaataatcccttccataactgtaaggttaatagaagattgataattcaaggggtgccttgctgccaggaatccaagacacgcacaccagttaaaggaactgtggtatatattttttgaatgaacaaaaaagacatactctaaccttaacagatcagagatcaagatgatgccacatttcgaattagaggtacaaagtatggctaactaccagcatacaaaaccccaaattcgaacacaaaacaccaaaacaagagcctgaatacataaaaaagatcccaatagactctcaaaaatcaccagttggccaaatataacttaaaccatgccccctcgacaaccaagacacatctggaccatattgcggactaatcaacactacatcagattaaaagtaaccaaacaaagggtaaaaaacaagaaacttggtgcactatattggcccatactagcggaccaaaaccagctctccaaggagccacatatgagctcactactacaaaattactcacttaaccaatagcaatatctaactgctcaagccaaatattcgcactgagatagaattctttgctgcccgtattctagggaaaatcacacattcctgccagtaccaacacaacatcagactcctaaaactcccttagcttctctgtcacaagtcacaaccaccattgatacttcactgttaaatcaatgcataactagaactagaaaaacatcttaaaaggcaccaaactacatttggacacccgcttatactagaataaaacagaagcagcacctttaatttgaacatagcaccaaactacatctcttgtattaaaaaaaaaacggattgaggaaggaaaggagagggtacagtatgaagcagaagccgcagggggtcttggagttcttgtcgagtcccatgatgatcttcctgatctcgccggcgcgggagaagagctcataggcctgctcctccgtggtgtagaaggacatgttcccgacgtacaccgtcaccgacgcctgcagcgccgcctcgtactcctcctgcgtcccggtgaaccgcctgtcccggtacgcggacagcttggtcgggtcctggaaaagcgaatcgggcgagccgcctcagaggaagggcgagaggagggggaatcgacgagctcgggtagctagggtttcggagggggggggggggaatccgtaccttgaagagggacgccattgctgcggagcggcggccgcgcgaggacgagctgtttgcgattagggttttgcctccgatttcgaagaaggtcgggtggggattggggagttttggggaagggtttcaccctccttgcgggggatttgccgaaccctagttgcccgggaggccaggagctgcagcctccaggtaggggaggacgggaggagcgatgtgagttgaaagtcggaggaaggagatgaataattttctccgatttcacgagatttactctaagtttggggtaattccgttaaattttaggccctcttgaatgggaggattggtacgagaaattttaaggattgtaatcatagagaaaaatctcctatcatacaaccctttattaaaggaaaaatattgaattctactgttttgtttgaaatttctatggaataaacaatcctaaagtgattttatatgaaaataacgaattgtcatagctcatgttttcaatttttttcttacaatttttcttgcgatacaacaacacctattttaaaatttccttttgtctttctataagaattaacaatccttgttactaagtcgtgtgttttttcaatttatgtgttttaaaggagtctttagagcatgtacaatagcgggctattagccagctataaacatattttcatgagataaaagatgagagagaaaagcagcgggctacaaatatgtagccagctgcagtacggacttcaagacgtaatgtgtgtatgacaggtaggaccatatgttaataatatagtacgcaactattgtatgaattggctattagatcggctataaataaattggagctagtagtaggctatactattgaacttgctcttaggcaataagaaacttcaaaaccaaactgaattttggttttgaaattcaaccacgctttttatgcatgctaactcgagacgagaatctgactcctaattgcttcagaatttttgccagaccataagaaagcaacgtacatgatatggccattgtcacaacatgggttatgctttttggaaaaaaaaatctatctaaatatagctaaaacgaaatcaccatacacgttaattgaagagaaaaaaaataaataactatactgccaggtcgcggtaggtttaaattagagtgaaatgcgccgttattaccataacttgcaaggtgggtgtaatttagtcacccatattgtaaaatgctcaaacaaatcactcatcttgttttgggggtgtaaatcatataaaacatgtgtcgtatggagtgttcgcaatgaagttatatgctatattaatttattttgcaaacatggtcacacgattcataaataatccaacgtgcaatactaccggtagtaaaattcaattaatgatgaattttgttattgattgccaagcacaatatgaccgtgttcattgaaagtaggggtagtagtatatacataaaaatataagtgttaatttgtaattttaatgcttatcctgtctacattggtaaaaaatgcatgatgctaggttaatatggactccaatttgaaaacaaacaatcgatgtgaaaatgtatttgataacatttgcactatcgaagcaagatgagtgacttgtttgagcaatttacaagatgagtgactaaattgcacccacctcgtaagttgtgataccatcggtgcattttactctataaattataacaacggagattatatctcatatataactgtccgatcagttttgtccattcaacattccttcagctcacaaacagacatagaagcagtcagcccatgagcaaacgtgcgggtctgtttggcacagctctagctctagctccacctctcatgaagttggagcccagccaaacagttttagctccacgcagagctgggtggagcgctctcacaaaatgaactagagaggtggagctggttttagacagctccacaactccactccagactcaactcctggagctaaatttaggagttgtagctctaccaaacaggctcgcatacggatacgacccattgcttcctttacttctgcaactcgatggtctcatgcaggaatcccttctttctataaagttaataaagttaatgtgcattaaacacctgaaactaacatgcaagcataatatttattagcactcctaaaagctacatgcaagcatgccacatcaacccattaaacacaaaaagctcaacatacaaacatataataattatatctacaatttatttcatttaaaaactaaacatacacatgctaaatcatcattctcaaattattttcataatatttcaatccaaattattttatcatttctacattgtctaacacatatcccgcagcaaagcatcggacatcatctagttaaaaggattattaatcacaactagaaaaagcatttttcccgacattggggtctttttttcgcaggctgacataacccttggaaccaaatgaccgcctaaaaaatataaatcggggtgaagttcgctgttcgcctgcggactacttaagcgatgcctgcaggcgaaccttatgtactccacctgcaaaaatcgtacctaccacaaaaaaaaaaaatcttaactccttatcttctcctcccaccccctccctaccactcatttccctctcaactctctctctctccctcaacacttcttctcctctccccaccgggcccgtccccctcccctccctccctccctccccgccggagggggagcgacggcggcagcgcggacggcgactgcggcggtgcggctcccctcccagatccggctggagggaggtcaggggagggcggcggtggtgaggcgaggcgtggggccagccacggcgcggggtggcgacgacaacgcgcggggcgggggcggcggctccggcgcggctcccctcccagatacggccggagggaggccgggggagagcggcaaggcgcggggccggtttgttcgtctagaggattttcgtaggcgggctatcgattttcgcagtcgttggtctataggcggtccttcccccgcctgaaaaaactacttttggccgcctaaaaaaatgatttttctagtagtgaatcacattacatcatgaatcatgcctgcgcatatgtactcgtacagaatacgtacaaatatatgtattggtacatgcatatatctttatatacatctatttaatctaatctaacatacttaaaatgatatatatgttaaaaatatatgtaatgttttcacagaaattcccgtacgtcactccccttaagcttaaggggggcataggtgctgtgttaagacttaagagatagtgctgggaagattatgtttgcatcttatgatcaccttgctcattgccatatagtgcactggaggcagagtcagagatgctcgcctgtaaagaaggaattgctcgggccttgcagtggaccctggtgccgatcatcattgagtcggactgtctggctgcaatcaatatgattcagtatgaggagaggatatattcggacatagcctttctgatccgtgaaggtcaaggacctgctattaggaaatagggagattaagggcatgttcatcttgctgtaaaaaaaccttatcaaattttggcattatcaaatgctaaaattttggtaacttgccaaaattttaacatgatttcttatataattaccaaaatttggcaggaaactaaatatagtcactttttttagcaactttaccaaaatttggtaaggttgaaaatgacaccaatgtgaacaggccctaaattcatcaagggccagaggagctaaaactgtattagccatattttagcgaataaggctcgatgcgaatatgtgtttgggctctggctagaaaatacttataactttatctcacgtatggtttgtgaggaagcttctcttgagtactaccttcgtttcaggttataattaataaatctagacacacatatatatgtctattcatcaacatatatatgaatatgaacaatactataaaatcttataatataaaacggaggaaataatatattccctatttctcgaaaaaaaaaataattgctcgttgctgtacccgtccgtcagctattgacctgtctagcccaggtgtggcccaacatccattgtcgatcatgaccaggcccgtatgatggacaatctctcgagaaaaaaccaagacattaggattgggtttttgcaatttcaagcacatattcgcacatatctcattatcatccgaaagaggtccagaaggatagcaatctactccctttatctcacgaaaaatcaatctagagttgagagtacaggttatatcccctctaatcctatattgatttttttgggacggagggagtatatgctgcacaagtacagaaaatcgatctgttgtgttaaagtgctttctgcactaaatgaatccgggttcatcttataatgttacactctcttcctccttagaaaaaaaaaatcaacttctaactatgtagatctatttaaattgataaccagaagtttatcttttttatgacggacagtatttgagaaacaaaacgctgatgattgtatgagactaatcagcattcagcaacctaattaaccaccatcgaattcagcaagaaacgtgtgttcggtctttgtgttgcaagcagcagcagaggatggcaggttttatggtcgtgctgggccggcgtacgatgacttatcccccattcggcccatctagaatcatctcttcatccacaagcagccagcccatcaggacctttttatcccaaagctgtagtcaaattcgagaatttttttcgtttttagattttttttaatatttacagaaataatctatcgaccaaaaaaattgtagaaatagcccctaccgcctcaatggtgggcggcaagctgacgtggcagacgatgggtcgaccgcgccgtctgccgccatcggccaaaattgcgattaggcccttgccgcccatacagagggcggcaaggggctaattgcaattttggccacccataaaaagcttggggccgtacttttttcatctgggtcccttgccgcgatggcggcaagggacccagatgtaaaagtacggccaaaagatttttctatgttatgttaataataaataaagaagtatttattggtaaaacttgttaatattgttataaaaatgtattgaagttggttgttgcgcaatttcatatgttaagtgaggtattattttgtaccttattcgacgtattagtactcggataatttatataggcctatcgcagtctgggtcgtagaaacattatatggacttaaacaaggagaattatgtaacatgaagaaatagtagtacaatttgaacatgatattagattcgaactaggagggaggtagtgcaatagttgaacacaacgacaatgtagtaatgggacaaggaagcatgacagtagaaatttcaatatgccaagttgtccgataatagctaacccctacgtgaggatccctctcctctctcaaaccgcactttagtaaccctgtattgctctggtagttcaagctgcacatcacgactaggtagagttagaacccttctggtgtctatccattctctgtattgacatctccttagtggttcctaagaggaaagaatagatgtaaaacgagcaaagttaggaaatgttgtgagaaaataaggattcatgtaatcaaaatattcttaccatgaaatcgtcgtcaagaatatttggacaaacaaagaaccttcgacccaatgttgtaggctttatggaacgaagaacctgacaacgatcactaaacctgtatcttggacgggcttcccatggagggagtgccgtagttagcacccgccagtcactctgttgttcacgatattatcgttcataagccgcttttctctgtaagtattgctcagtactttcggatgcgaaataccagcgaccttcttgtaaacaagtggttaggtcgagaacgggattttctgtatcgacccactcgatgtatacgcaagccgtagtgcgggtctgctgaatagagtagtgttacaaagaataaagcgattgcccatacggaatgaataagcatatgcagataataaaatacctcacggtcatagttagggcacctaaaaaagcgccttcctcgaatatcaggattcctcgaagccattagttggcatcgatcaccgcataggcagagaggacgctggcaccaaggtggtagtaggtatacacaaggatcgctacgccagtttggatcctcaacactccggcgtctagccattgacgaaagccggtcggatttgtaatgaagcaagtggggaagagagtactgaatgtgactgagttctgaaagattgtgaggcctcactcgttaaggcgacttatataggcgcaaaaaatcgagtgatacccctgacatgtgaacgtggtggggtatggtgggtacgcctgattggggccgaaagttacatgcctgatcagcgccgaaagttacattggttgtatgcgccaaatggcgggaaaatactcgtatcgcacgcgaataaaggaggctgcatcggtgcggcagaaagtagtcgtgcatgcgccgaaaggtatcgtgcatgcgccgaaaggtatcgtgcacatataacaacaacgtagtcattacacaagcatacagtactggaaagtgaagcaaataaacaaagagaagactgctctactggccctgccccgcgccgcgaccacgcttggtcctccgggcctgtgctcgcacatggtcctgggagtaggtgaaacgatccggtggcacagcatgggtagcacgagtgtcccgcggaggagtggcctgcgcctggtcctgcgtctgcaccggcggtgcgcctcccaactgtgaggggccgatgacgtcctctgtcgagcctgaagcgaagtcgaagtcagtgatgtcgaagagcaaggtggaaggcagcaagcggtccgaagaggtcccagcatggtccagtggtggaccctgactcgacgtgccggctacctgtgacgaagtcccggtgtactgctagaactgcgctgagtgcgaggtcgacgcagctgcctgagacgctgaccctgcagcctgggagaagtgcgcggcctgcgtcatagcgaactaggcgaaacctacacatcgacaacgggacccttgtaagctaagacataaaatgcatgtaaattgattgtcgaagtaatgttgtttttttaagtacctgtggggggcacaacagaaggcctagccgaggaaggcggggtgctgaacggtgcacgaaaccctgaagcaatcggcaagtgaaacggctcacttatatgtgcgaggcatgtacagaaatagtaataaaaatacttacctccgtgcggagggggagtcggcctaggaacgtgcgcagctggacggggacctgtcaatccatcgtctggccgggtccgcgtcgccggcagcagcctccaccagccgacacatcggtaggaggccggcctcacacagcctacaataacaaattaatgcgtcattataaaaaatattacagcgcaactaacttatagtgatacactgttcgtacctctcgataaaggagtcgtgaaccgtgagtagctcaccgcacgtccgtgcccggaacgtcccaagctgagccccctgcaccgcaggaaggtgagaccggtgtcggtgatctatcgccgggtccaacaactgaggtgtatcctgacgtgccatctctggaaaatatagtgtttcgtgttagaacaattcagaaagtagtaatgtaaaacaaaagataacttgcaaaattatgaaatagtaataaagtcatgagaataattatgtacaacaagagtacaggctatttaaatatagcaaacgttactaatggtacataacgatgacatgcaatttaacatatatgtagagctcgataatatatcataacattacgtgtcgaagtccgacatacatcagcatacctaaagacgttaggcgccttagtctgacgttacatcacgagaccaaaagacatgacatgccgaagtctgacattacacgacgaaacataaacacatcgataagttcgaaacgaattacaaacaaagccacatgccaacatagaacataagaactacaccacgtagccagacgtggcacgatgacgcctaggacgtggtcgagtggaggtagtgccttcacccgtagggcgagctccatctgctgctgatcctgatagtcctgcctccgccgcacttggtttctccttgtctttaggacaatgcttgtaggtgtgcccatgttcatcgcatttgctgcaacgcttcaccttgccagcctccaactcgtccatatcgttgtggatgcgacgagtcctcctccttccagccttgcttcggagcttcgatgggtcaggaatattgagtacttcatcgttagtctctgtgacctccccagctatgccgaacccataaatctcgccgctccatgtatgatatattgcttgcttactgaagtactgtgacacatatactgcatctggtatgccacactccgctgcggcagcaatgacatgggtgcatggcctgtggagcagctttggctttgcacaagagcaatgacatgtgccgtcggctttgagaacacacttctgcttcactctcttgcggtagatacccctgcctgccttatcttgacatagtatctcaaacctgtgctgttgggtacctggcactagtgcacgatgtttcatggcctttttacgcaactcctctagctttttctgcatgaaagttccaaacaaaatgctgttgttcggcatagagggaagaactgcctggaaccgatccctaaaatacctgcatgtcccatgtaaaatgaactccactatgccaactagtggcagtccacggacaccgcgcatcacccaattgtaaacttctaccaaatttgttgtcattattccatatctagcaccacctgtgtcatacgccttggcccatttctcttttggttcatgcagaatccattgagaaaatttccgaatctccaatccagttcttctaaccaatgttggactatccgttgggagaggtccaagagcttgaggagggtcagcaacggcggtcgatggagccgctgcacgctgatcactgcatttggctgtcaactcatctaatctcttccaaagctcattgaattttttctcctggttctggttgcacagcctcttgaacatgttcatgagctccttgttcttgaattgcttgaagaaattagctcccatatgacgcatgcaccacctactctgtacatcttcccaaacaccggggtatcctcgttccatactcccaaactgcaacttttctatcgctcgcagaatgccagcgtacctatcatgtatcaggcacacatttggcctcataccaacaacttttgtttcaaccaatttcaggaaccagtaccagctgtcggtattctcactctcaacaaaagcaaatgccaagggcaatacctgattgttcccatctacccctattgctgttagtatctggccccgatactttcctgtcatgaatgtcccatcaatgcagagaacaggacaacagttcacaaatgccatcttgcatgcatgtagagctaagaacgccctttgcagcacactcttgccaggatgttcaattgaggggaatttcttcacttcgtaagagctcccagggtttctttcctcgataacaccaagcaggcgtggcaaattgtcatacgaggcttcgtaagttccaaatctcatctctattattttctgtttggccctccaggccttggcatagctaatagtatacttgtatgtctcttcgatgtgtcggattattgaccttggttcatatgtgagattatcgacgacatgcgcatatatctcagatgcaacaaatgcacatgtaatgttcctgtggtatttctgaacaccaggtagaaaacatgtatgcttggtaacgactgacactgtccaataattcttccatttccccttatacacgtgcactctccagggacaaccatctttttccttaacacaccgaactttatattgagaccggttcgacttggcaacccaaaactctctatgaagtgacactgcaaaatgttttaccgcctccttcatatcttctgctctactataaatcgctccctgaataacctcattttctttgtactcccatctcacactatcctcttcagagacgataagcccagaaaaatcctcactagcccattctgctggattaatatccgtctcatcatctgacgaatcaccttcctctacacgctcgttgtcagaatcctccctctccatttcatccacaatggcaccgacagtctccccctcgtcggccactccacctggttgaatgcccactggagctactacgcccccgtcctctcgtgcgttgacctcttccacagaagtctcatttacttcagcacttggtccctcgccatcatccattttcatctgcacacctggatccttcgggtgaacaaacggaaccaaagctagaggccacccgcgttgcaatgcattttccaaataccatctccacattcgagagttttgaactggcattagttcccaataaaaaccctcagttgcccgacttactataacattgattgttatgtcacttgtctgtggatcaactctcaagcccctcattaaccatccttttatagaaggtacactcctctcagccggtctatcaattcccctttctgatacaataaaatctgacagatctaccccagtggcccgtaacggacgtttcctggtccatggtaaacttggaatatttgtttgttcgacatatctgtcaacgaaataactagatcatattactctttcatgcaataaacatctacaacgtaatatcttcttgtgtaagccaatgcaacggtaatgtattgatttcaaactagcagatctacgtagttaccgatatctacaatacgcacttctagattagtacaactaaaaccctaaaaatataatgcatttattcaaacaaaattttaaaaaatacacactatttaactcaatagtcacatataggatctatgaatattacctgaaatcggcgtctgaatccggcagggcttcgccccttcttctcttctcctcccctctctttttttttcactggaattgaggagggaggaatgagggctaggggctgggcggcaggccttttataggcagcgaggcctgccgcccggccagagggcggcaaggggccgcctgcaaaatggccggccccgactggcttttttgcattcgggccccttgccgccccaccagagggcggcaagggttttcctgcaaaaaaccctccctccgtcaccgcccgttcctcccccgtttgccacgtcagcttgccgccccagaggtgggcggcagggcctatttttgtaatttttttgccgatagattatttctgtaaatatttaaaaaaaatctaaaaccgaaaaaaaattccaaattcgatcattgtatcgccgtgatgtgccgatagagttgtcagccaggttgggtttattttctgacggagtatttgccattcaaaccaactcacgaaaatgtcacattaatttgatatccatcacttattacttgagctagaaatgatcaggctgcaagcctgcaaggtttaggagacgtagaaaaggaacgtaataccactctcataaggtagagaatgaaattaacacgttaattaaagaagaaaaaagagatttgaactatttaatcatgttagtcagattataataccactttgataactatatttgctatgcataaaaagatatatatttgtatttatataaatgcacagaagcaagggccgattactacttccgttttcaaatatgacgatagtgcagtcatcacatatctactgtcctgagaaatccaccgatttcgtgtagcgcgcacacttaacaactgatgaaaccagtccatccaaacccatggcaactcagaggctccatttttatctctagttgctcatcagtttggctcgactcgttaatactacgagtttgactcaatccgagtcacgagcttcgttttttcacccctaatcgaacttcatattattaatagaaaaaaaatgattttagtgtggtatacaaagtcggtgaaataaaataaaatgttccatcgtccattttcttctagtttcttgctttatgaatctcaaagcaaacgggtattgggagaaccttaaagcaaactaagctaatgaacatactgtgtatatttatatttataatttaatgatgcacttcaagaccaacaaagaataaatatgccacattaatctgatatgatctgatccatattcattaatctgcaaagagataagaacaagtaggtgatgatctgaatagtataacaaattcatgatgatctgaataggagaacaagtaggtgacgatatggatatatatataggaccaatatatatatcatcaaactagatacacaattgtaatattcgccttgattacttactattaacccttttcttttttagatgcatacgcttctatcgaacagtgtatactcaaaggtcattatagaataagaaatcatacagaaatttccttttgttgcataatgaagtggatccaaatatttgcagtgttatgtaaaaaatcaagattacgacgttcacattatcgtgtaattaacagcaaagcgaaaaaccgtaggcatgtgccatttgaacataactttaatatcaacttggtgatacccagtgttttgtgacgagatatttatggctgactatacgttaaatattataggaacaataaatattaaaatatataataatgatgctaggaagatcatatacttgtatgtaattgaactctatgatataacattctagatgatgggtcttactctatcataatacttacatgcttatatttgtatgttgagttttggcttgtaataattgctaatgggtatcaactatataaaaggtatagattggaatactccagtaaaattcataatttgaacacgtgctgtccgagaaggccagaacagaccgaatcggaagccacgtgacgcactctgttacgctagagagagagagtagtttatccctatgtttcaagcaaatagaaaccacctatacttcaaactaaattttctcttaaactacttatctgatctatgatccgattgcgccgttgtgctcttaacaattaaatctttataacaagatctcacatgattatattttgatgaaaaattataaattaattttataatatatctaaattacttttagatttcactaaattacttcttagacatataaaagtaaatttagtaaagtctaaaagtaatttacatagattagtaaagtaacttaaaaaaaagaaagtaactttattacaacatcaaaagtaaatccattatagaggtaaaaacatgagtctatatagaaattacatttaatcaacacaaattacatcactgactagaaatgattataaaataaacaactcacaatattatgaataacattatgaatgtatagatttcttttaatgtcgtaacaagttactttacttttgttttaagttacttctataatatatctaaattactttcaggctttactaaattacttttatgactaagaagtaatttaatgaaatctaaaagtaatttagatatattataaaattaatttgtatttttttcatgaaaatatagtcatgtgagatcttgttataaagatttaattgttataaacacaatggtgtaatggggtcgtaaatcggatgagtaatctaagagaaaattccataagaaaaaaatacatgcacttttgagtatactagtagcaactagatatgagattgaggtagctagttatgaccatacagagagcgatctcgttgtagacgcgtcctttttttatttcagtacatactgagactgatatactattatatagtggttgcaaaattagttatatttacacatctccaattttataggttatgttttgttagctagtgatccaaatataacaaatgttatacaatatcgaatcagtatgcatgtaaggtactccatatttctttttttgtttgttctatagcagcatatgtatacattttttggagaatcatattttgtttcatatttgcataaaattgttttattttctgataaacaacaagttttctccaagaggggacaaaaagaatgatgaacatacaaaatcatataccaaaaaatcatctactttcttgcaagaaaaatacgattgaagcgagggaccatagaagtaatttttttaattgaaatttccttcctatagatggtatagcatatatacaagaaagtgagaaaccatagtacaacaattggttcaaacatgcatatagcggcagacatatcagtgtgagggaactcgagcagaaaaatgtgtacgcaacttttgaatgaaggtactacgaactagctagcgctagtcataaactatatatccaaacttggttgaacaaaaattggctatatcatcactttaactagagtaagcatgatattctaagatatctttttggacacaacacacaattcaatctaacattacatatccatatatagacacttttggtgtccaaaaaaatactgcatatataagtttggaactattgatactcattcaaaataagcttacatggagatacaaaaaatgatactgtaatagtttgattagttgccacaatgtatcacatacatgatgaatttcgagaaaataagaaaccaatttagttgtttaaacaaacaagggcgcatatatatatcataagtctggatatatagtgaacctccaaacatttatacatgatgaaaattagccatagaaaattccaaataaaattgcaacacttgcagaaatagcgcccatctattttatacattcataactttacatctaaatttggtctccatgtagtggtatatagaaatatagctacctggaatacagtatatctaaattagctttaattagttggattgatcgatgtgaaatctggatgtcatattttgccagtagaagaactcaacttttgcaaggaaacatgttatgcattagttacacttacaacccaccagccgagatgtctttgaaacgcaaaatatcaaattttgttagcagagggtaatgataatgattctgagagattaactgtgttaaaagaattaaaagacatgaagatgttgcattagctagctagatctcctctctactagatatggatatttacatatatcaaccagtagtctagtactcctgaaaataaactgatcaagagagaacatggcattcacagtcaaagtgacgaatgaaataaaaagcgaactttacttcgggcgcaggaaccatcaattgatagatatgtttagcaccataataaaacctctgaatttactttatctggttaaacagaataagagaaacaaccggaccatttgtttctagtaagctgaaaatgaaacaaaaaccgaagagagttctttttttcttaaaagattaagactaacaagattccacatccagctagatctcccctaaaccaaaatggttgaagctaatgtatgtacatagttgcaggtttgcgcaaaatttgttttgatttgggaagttttcctttgagagagagagagagagagagggagggggggggggggacagtggcactgcagataagtacggcggcttgcattgtagagataagtacgagacgtcaccaatagaacagtaagtggacagtgacctagtccctactatttctggagctatcaggattcaggagacaggggttctatcacgcaattacttcaagcagcagcgacacgtgtagaactgaacaagtagaggacacacaagaaatctgtggcagcaatagctagctactgacctgatcgatctggtggttagtgagatggaaggagtaattagcagatctgagggaaatttctttcctcttcccgtcacctcctctaattaagctgatgcaacgaacattccaatcttgagagctacagtaagaaaaggaattgaacgagagatgcgcgcagatctgaggggaaatcagtagatccatgcaaattttatgtcggttatttccaagatccatctcttggaaccaatcaaaatcagtcaatgtcacagtaaatacagttagtattttgtaatcccaagaaaggaaaaggcagttgggagttgggatcccttggaaaagacgaacaaaattagcaggacaaatcaaaggactcttcgtacaaagcaagagggaatccgtacagcaagtacacacgcgcgtgcgtgcgtcaccgactcaccgtcgttgtagatccggccgcgtacggcaaccgcccaaaaaattttgcaggatcacggatcgagcccgaggagtacctggggcatacgatgataagagcacccggacgcggcatgcatgccggcggccggccggccggtgcggtggccgcggcgcgcaggggcatatgcaaggcgggcgggcgggagggcgcgccggccggaggtggaggggggtgggagaggagtggatgacagacagagcagtgagcacgcggccgcgacggcacatccgccggtgccgttccgcccggccgtgtgctcactctcttctgtcaccgcccagcgcccgcaccggcccggcccccccgcgcgcgcgccgccagccagctgccgcggccaccgcacgcggcgcggtcgacggcgtacgaccgaccgttcgacggagcgaacaccgctttgagatgcgagtgtggtgcgcgccgagtggtggtggagggggaagggggtgagggggtgccggctatataggcggagacggccgcccgctgggccccgcggtggcaggaacccgtcgatccgcgggggagggacggacggacgcgcggtggaacattccgcgctggcagatggggcagcctggctggccggctggctagctgccttggctagctagggtttccccgccccgaccgatcgatcgatcgatcccgcgccgcgccgaggcgcgatatgatgcgatcgcgccatgtcgcgcgcgcgcccctcgcgaacgcgaacggcttctggcgcaataaagccgagccgtgcgctgcgccgcgccgcgccggaggggggttgtgggctgtggccccctcgacacgacacgaggagggggaaaagcgcgcagcggcgcaggatatttttttgccaaatattgcttctctccccttacccgactttgacagtacgagagcagagagagctgcaagtccaaactgactactgttactctgcctgaccgacctgcaggctagctacaattcgcacgcgtatgtgtacagttaattaatggacccatcacccaagccacgacccatcactccatcaggttgcttttgcgatcgagatagtcaaaagagataaagacatctctccggccggctaggagtattacctccctaaaaaaaaaagacaaaccatgagttgtcgtgcacaacgtttgaccgtccgtcttatttaaaaaaatgaaaaaaattaaaaagacaagtcacgcataaagtattaatcatattttatcatctaacaacaatgaaaaatactaattataaaaaaattcatataagacggatagttaaacgttggacacggaaatccacgatttatcttttcgttggacagagggagtataagctagtgtcatgtcagttaggtcgtcctcttggcctaaggccctgttagttctgaaaacaaaaatttcaccctatcacatcaaatagaatatttggacacatgcataaagtattaaatatagaaaaaaactaattacatagttcgccgggaaattacgagacaaatcttttaagcctaattgtgacatgatttgataatgtagtactacagtaaatatttgctaatgatggattaattaggctcaataaattcatctcgcagtttcctggcgagatctgtagacaatgttaaatacttcaaatgtgtgtccgtatatccgatgtgacacatcaaaacaaaaatttttggaaactaaaccgggcctaagctggagaaattttgttgctgctaagaacaaattttataatagatgtgactatcacctataattttatttatgttaatatatctctacaaattaacatatacacgacaagttacctacaacacacaaatctcagtaactctaatttttttatatttttattgaattttgtatagaaattgtccctcgtacgaggggtgactacttaatttactctctcttcatttctctctttcacattagtaaatgagattacatggtatagaggatcataactgcttaaatgcttatagtggcccggtttagattacaacttttttttcaaacttccaactttttagtcacatcgaactttcctacacacaaacttccaacttttccgtcacattgttccaatttcttcaaacttctaattttgacgtagaactaaacacagccagtatttgacaaacccgagaaaatgcacagccaagatcgagtggttttgagtgcagcatcgcttgctccaaaaggatcaggccaaagagcacgagagcacgcgtcgaatagtttttttttttcgcgtgattgcaggcatgttgatgcagcaccaggggctacctgcaaatctacagtccgatcttcacacttgttgtacgtagctagctagctagctaatcctttgcagggtatggctagtacaaatgtctttcttccagtttgaggcatgccaagtggtggtggaggcagaattggatgcatgccacaccgctcaacttacgaccggtcgcatgcatgatacatgtgactgctactgggagctgacaaaatttgacacctcccaacagaacggctcagctatctttaaagcatgccacatgagcttcaagacgagatagagctgccagataaaacttgtactccctccgtctcaaaaaaaaaaagataaaccttatagattttcatgtccaacgtttcaaaaaattataaaaaaattaaaaagacaagtcacgtataaagtattaatcatgttttatcatctaacataaataaaaatactaattataaaaaaaattatataagatggacagtcaaacgttggacatggacacccaaatcctctacggtaacacacaggtagaatggtgtccacaattacagatgttctttctcatgagtgatcatgtttggtatcgagttagccaaccatcagtgataggcttattggtccataacaaaatcggtgggtatgtctagtgaaatatgagcctactatgatattaggtccatcacaatattgtactattgatcggtattacaggctctaaaatccagtcagccttaatcgaaagaggattaggatggtgacgattgaactgtatactttctagattaagcctgggcaatgtacaggatgttgaggggtggatgatctggatgaacctcacagtcctcagtgctaaaggagtagcgcctgggacgagtaaaggcaaaattaaatcggttccatcttcgtatataacatatatgtatgtacaaggatgatttttgccctagctaatttgcacgctctttttttcgcatgtgatatctaatcgcatacatgacatagagagaactagaagcaaataagacaatgggttaatttttatgtagacaaatttagtggtttgggagtgtatcaaagagagggaatgtggctcgggtcttgttcgaaccagggcaagctaggttacatgttactggcttgacagacaaactcatagtttttacacaatgtcctaggagctcggggagttgtgggccccaccaggcctttcctcccaggggcttggggcgttatgggctccaccaaggcctacaaaatttgcatcttgaagttgttaagaagagtatcgagatctacaagatctacatcttcaaggtttcaagaagagcaccaagccctacaagatctacatcttcaagttgtcaaaaagagtatcaagacctactacatcttgtaggtgcaggagcggtcactagtgggtaccactgtctcgtccaaggacatgcccatcatgaactccttcatcgacatctttgaaaatttcgtccaatacaacaatgaaatttacttccggcaatgggagcactctaaagtgtccgggtgggtgccccaaggactcagcttgccaagaggacacaggttgacccgaacacagcagccagccgatgacaagcatttagtctctcgggccttgagcactaattagggtctcccgagcactccttgctggggttcatctcattaaggaaagttgttcgggtccagtaatcacatttaaaccactactttacattaattgtgaggtggttcaagattggcgtacaactcatacgctatttggggggcgtgacggtacacgcaaccccttgcatgcccacatcgcccgaagaacacaaggcatgcgacgttgcacttcctcaacaaccatcccatgggcccacctctactggctacgatggttgacggatggtcctagggacatttggaacgaagacttttaactcccctctccacttgttagtcagtaggtgtacctgccacatccggtcggcttgcttggaaggaaaaacgacaagactaagcatatcaattttagagtagtagaccctactcctgcatgcatgcaacaacattgtggactccccttcacatataaaaggaggatccatgaaaaacaaaatgtttgcgctctcatctaagctagctaggttagccaaacatccagtgagtaaggagcttttcctcctcacttagtttttcttcccacatcactttgtaattcctaagaacatgcatagtccactgcacaggagtagggtattacgtattcatgcggcaagaacctgcatatttgcttgtgttcatctctaccacgcaataaaaaactcgggctcagaacttacacccaggccgaaactcacaaatgaggagtacttagcttccctgctagaggagtttcacatactcactcactcactctctctctctctctctatggcgaaaaaataagcatcattgcaaaaattatcaaattatcggttactatttgagatgtcctcgagcctaggcacattttcgtccatgcaaattaagaccacaaatcctatagcattttttttcatgaaaacttttaacatatatactccctccgtcccaaaataagcgcagctatgagtttccgtgtccaactttaatcgtctgtcttatttaaatttttttagaaaaaactaaaaaacgtaagtctcgcataaagtactattcatattttataatctaataataattaaaatactaatcataaaaaattttaaataagacggacgatcaaagttggacacggaaacttatggctgcacttattttgggacggaggtagtagtgtttattaggagcattaatgacgccttgaatgctatatcacaagttcacaacattagggagtccattgactatctatgaccctgttggttgaggactaacgttgtcacacattttttttaagtaaggtgacttagcttagacatgtcacatttttgtggcaaacaaaatgataaaccatgcttaaacaaagttagataaaaaaagttgggtcagatgattaaaaagttagataagtcagagttgtaaccgaaaccaaacaccatctacttaaaaatataatttatctaagattagatgtggtgtggtaaattcagttaccaaccaaacacgtcctttctcttcgtcggctacccaaagccacccatgcatctactgttaatttgcatcggaaaacatcattactactactccagtagctagtacgcgctgcagttgtgtgcatccgaaaacatcatcacgatataatttcacgtgcgccgacaaaagccttccattattgttcactgtcacaaatgttttctctcccgggatctaaacatcactgaccgatcaactcgcactgtagtaactaattgtacccggctagctttacgttcacagtacaactccacaaacagtaaaacaccaacagtaaacacaccagctgctcgttccaattacgagctactcctaacttattagagcaagtttaatagtataatcaactattagctccaaattatctagagtcaatgtaatagctaattcatacaatagttgcttactatactattaatacctggtcccacctatcatacacatgctacgttttggagtccatactgtaactggttacagatatgtaacctgctgcttttttttcttttttttatctctttaaaatatatttatagctggtttataacctcttgttcctgctcttagctgtttggtaggcaaggcacgtagctccacaatttttcctttgctgtttggtaggccgaggtcgtatagctccacaaatttctcctttggcacggttctcgagtgccgagatcggaaatgtcctcttcctctaggctttcctcttttggtccgttcctaattggccacgattaagcttcacatggagctcgatcgatcgaccgatcgcgctgtcccagaagataagccgcgcccgctcgcgtcgcttcgaggaaacgaacacgccggcggcgagatcgatcgagcaggaggaggcaggaggccagagccactctttgtcgactcgtgattggccgcgcctcgctaatctattgtttaatttaatttaagagtgcttaattaatcgtcagaaagataaaagcagccctgcttttaaattttatcggttgcgagacatgcaggcagggacattattggagcagagccaataatgatagttaattaagtactatatgtactagtggattggttaatcagataatgtgttgttaattagtctgcacaatgccgaagcttttggccgggtgagcaggagctcgcatgtgcactgtgcacgatcgatcttgcgacgaagattttgtaattcttaaggtagatcatgtcgcgctaagtgctcgcgaataggatcaatatttggtggtttattttgggaaaatgtggttttggttttcttagtgtacagcgtcaggggtaagcatgcatgattggaacatcacaaattcggctcctcctcctcctcagactctaatactttatactcctcttgtactttagaacaatagtaatcactcctcttgtactttaatacgatagtaaccgctccatttgtaaattaaaacaccaaaataatcgctcctcttgtactttaaaattaacaatctgcaatggtacaattggtacgtcatatgtgtgcttttcgatcgaagtgatagcatgcatgcatgctcctagccctaggttcatagaaggtcagtcagcggcgttctggtcccctgtagtaccatattctactcggagcatgcgtgaaggactttggaatttgagtgtctcttcctgctattttaaattgccatccaatttacagtgagatttggatttttggaggcagaattaaagaatttaaataaggcatggtagcatcactactcagaattctgatattattccacctgttataaaagttagtcaatatagcggaatgacgactaaccttctcaatcgcttcagtcattgaccacccaagacatgccagatgacgacacaggaacacacgatatttgttaacgacgttcagccaaaacctacatccctggggctctgattatgggcgctcctccccaaccaatatagcttctaaccgctatgagtccggtcatggcctcgccgccatcatctctctgcgtgtctacgctctattatagtcgccatggttacattgtggtaccccctctctatttaagactaccaatttatttccctagtacgtccatgtaggcttcgatcttggaaattcagtgttaatcaaacggcttaattagattatttttattttctcgaaatggcatggaatcgctcttgaccccgcagcacaacttactattggtccaagcagcacccactctcaaccttacaatatcacctcaagatccagatgtagaaaaacaaatgaagtggtttctggttgccttttccaaagcaagaaatttgtaatagtgtatagacatgattatcaaataaccactttaatatacgaagaaaaagtcttagattcatataaaaaataaaaagtcttagattcgacaatattcgatagctggcgtgtcgttggtagactatacatgtataattattaaatagaaaagtattacaacttgcgagatgcgtgtcgtggttcccggttgctttttttcaaatttgaaaatttataatgtatagacatattattaaataacactttaatgcatgtagagaaagtcttagattcgacaatcttcggtagttgttgtgtcgttgatagattggatatgtctagttgtattaaataaaaagtacaacttgcgggatacatgtcacagttcctgctagttaaatattgaatccacatgctactataaggtaagttgtcacgagactaactttatgttcaatatatatataataaatttctaactggacggtcataaacgatctatgtgtcgagaataaactggtccgatctaacccaaaacctttaattgactatatccacaccactactctacaaaccaaattgaccgaataacatatggatacattatattttggattccaccggttgcacagcgtgtatgcatgcgtcgtgctgggtttgtgtgtgtggtcctatttcgtgctccatgcatcgatcttgtttttgtgcatgcaatgcgtggtccatgcaccaccatgccgctttttgaacggcggtctgagacatatacagtagctagataactataccagctatagctagctcagcgagatcgattcgaactcttttgaaaaccaagttgtgagatgtgcgagcctatatagcataaagtagtgcatacctatacgaatgcaaagctagagacgcaaaataattggctaacctatacgaatgcaaagctatacggtatatgcatgtactccactctctcctatagctagctactattcgatcgacaggtgtattggcacagtatcttttgccaatctttatttttggcccctgcagggttactttaattgtgcgcgtgattggtcggtccgtagctcgctgtagtgtgggcaccaccacacacacacactgtgtggccccccctgcgcgccctctgccactgcatgcgcctaagctaggaagcaagatccatctcctccatcgctagcttgagctgtcatttggccgcacgtctgcagatcgatcgatcggtttttgtggggagtagatggcatggtcgccgaccgatcgatcgacggcgagaccttaattcgtacgatcgatgcggcgccgtacgtacgtacctgcgtgcgcgccggccggcgacagttcgtcggtcgatggatggatggatgcagagcgcgagcggcgcgcgccgctcgtagctggtatagcgatcgagctagacatgcggcatgcgcgcgtggtaggaaacgatgtggagacggcaagaggagacaaagtcacaaagagagaccgatgtactatgcgtgtttgtgatgaccggcgtatgcggtaattgcgtatgccgtgccgacacgatagatcggggccgggccaagtgatgatcgtacgtaccttcctgagtcctgactcgtagtctcgtactagctccgtccgttagtcgggaaagtccaatgcatgtgacgtgcaagtgtacctgtagtccatttagcccctatttacttcacaccaaacttcccccaaactcccaacttttcattatatcacatcacatcaaaaactttcctactcacataaatttctaactttttttttccaaacttcttccccaatttcaaaaactaaacacagccttagtactgtatttgttttgaaattcaagcatacatcgcggattttaataacgtatacaatattgtattcctctgcttgtggtaacatatatactagtagatcgtagtaaagcatatttaattgcttagcctgtagatgataatatgatatgcgctagtgcttggtaaaaatcatgttctcattaattatttacaagtttataacgttgacacaatttctattgtacatattttaccattgtttttctaattatgaatttgtgaaagtagttgaaaatacaacaatatgaatgtatttttcataacaaattagtactactagtttcatttttggataacaaatattaatatatatattttcacatagtaggatttaaaatataaaacattaacatcatcattatttttttctgattctcatcgtgtgtctacttaaatagctgcctctcagattatggtctatttggtcgagctcgaacttcaaggaggtgggtctggagtggaacagcctaaacccagcttcacctctctagttcattttgtgagagcgctacacctagcttcgtttcttttttagtggagctgaaactgtttggctggcttccagctcctaacaaacccttagtctccagctcccacacactacacaaatgaccgtaatgtgacatcgacagaaggaggtgagagagataaaagatgggaaatgatgctaaactctcgagtggacaatattccctcgattttcatatcatttaaatggttatatatttattttagaaaaactagcaagatagataaatataagatgtatcacttcacaaacatataagatcgaatttaacttcctataattcataacataataaataaatttgactgtgaatgtatgttaacaagctatagtttagtttgttctttttgttgcaacttgtattggtagaatttaacttatatgttttagagtgatatatcacatattaatctatctatgttatcttttttttataactattcggatgatatgtgagaggatattttctcgagagtttaaaatctatttacaaagagggtgtactgtacgagtgcaaaaaaaacattatgcattattattttcatgtggcacgataaatactggtgtcggagaattgtcgtcgtccttcttgtcttcttatacgttcttcacctctctctattgccaacaacagtagccattaactgagcgggatatctaccccctttctctctctagatctctctgtcttaactgaagacatgcatagcactactttagtttggtcccttcaaaacatgatgtcttgtgtacaatgattaaaaggtagggccgctataaattcctatctctgtggagtgagccagatgtgtagtacccctatttggtacgccgcttatctctccacccacccaaatgtttcctgatctggcagctttcatgtggcttgcctggacgtgcgactgtctgctcactagctccaaacaacgtttaagtgtccccgatttgagaactgaccatctcccgattttagcagcacatatactccgtaatctattggtctgtacatacattaccacattcttattgtctttggtactcttaacaaattccaagtgtgtagtattaaggatgcacatgcagtatgctcctttttttttctaagaaagaaaaatataacctgacctgaaacttataagattgtgtggtatgctccgattcttcaacggaaaattgataactgttgcccttcgctttattcatatataactgtcgtcgtgggtcagatggaaaattgagcaagatgggggcctcccaaatcttctaattgggcctttcgcagcccatccaaagattgcccgcttcaggaagcccgcgatgccgcacgtcgttgcacccagcacccgtccgatgcggacgccccaaacgcacacgcgcttgccgatctagcgtagccggccgggccgttgcgcttcggcgagctaacgccgggcgcgccgagatccatccaccgaggggaagccgtgcgtacgtgccgaactgagctgcgtgcgcgagctcacgcggaggtaacgctcacctcgccagaaaacctggcgatcgcgcgcacgcaccgcatgtcgtacgggcggtggccgctcgcacgagcgcgagtcgcgtgccatccagctacccggtggtcccggtccctgccgcaacgcgggtctaggccgaggcggtaagacccaaccctgccatatctttgcggcgcctcctattccgtcaaggcaggccgcagccggcaaatccactgtgaactgatccgacgagctgtgtgcacggggaaacagggtgaggaataagttcactttaggtcccttaatttgtcaccgagtaggaaattcatccatggactgcaaaaccggatacaacgcatcccccaatttacaaaatcgtgcaaacgaaatcccttggcagtattatactccggttttggctgacgtggcaactatgtggctcctttgactaggtcttcatcccacgtggcattgacgtggcgcttacatggcaattcgatccgaaaaattgataaaacaggacctacatgtcagtttcacatacaaaataataaaaaatggtaggtccatgtagcccacatgtcatcctcactactcccctattctctctatcctctctctccttttatctctacccccctctctccgacgggaaagcagcggcgcgcaggcgctggccggcgggaggagaggagccataggcaaagcccgaggggtgagcctcctccctctccgccccccttaccgggcggtgagcttggtagagccagagccgagggggcagggatctgagagggaatggagagggagaagcggccgcttcccacgactcctttcctcccatcggtcaacgctcgcgcatcactcctctctcgccagccactgcgcgccacttctctcccaccggccactgtccgcgactcctttcctgctggccgccgctcgcgtctcctttcctacccgtggctcctctcttcctgccggccggcgcttgcatctcctctcccgccccggcgaggtcgatgaacacggcgacatccttctcatccacccgacctgctgctctacctgcggcctgccgccgctccatctcgcttggcctgcgagagagagaggatagagagaagagtggagtagtgaggatgacatgtggggacacatgggccccaacaattttattattttttgtgtgaaactgacatgtgggtcccgtgggttttattattttttcagattgaattaccacgtaagcgccgcgtcaagagagccacgtaggcgccaccgatagccaaaaccggggacaatagtgctgaaggacctcgtttgcatggttttgtaggtaggggatgtggggatgaatttcgaacttggcgacaaattgaggacctgatgtgaacttattcgaacagggtaaacccatgtcagggcaagctacgtgcgtgtgcacgatgacgaaggtttgtctgaaactctgaaggcggccacaggccacttattcaacccgcagttggttgctgtggactaccgaggcacccatttcagttgtaccatgcgttatggacttccacctgctcacggttcattgctagcacaaattttcgccggacgattactagcagaatttagtactactctgttccggattaagcttttggccaacttgcgggctttacctttactttactgaagcaatcattaggatccaattatgctttgcttccagcaaagtacaccttgaatagtatatacgaggtttagtacgtactttgatgtcataatcactgtagctagtagagtatccgaccgacaccagcccctctcgctagaatgttgcacacaccgagtactctgaacttacaaccgacgagcaacagattcacttgcttctcgttctgaattccgaaccacttctgcagattcacaggcctagttgggtagttgggtaccacacacgttactgcttagtgcttacttgcaaggttcccttcgagggtgtcctggcaattttccctctgatctgcagctctttactcttgttgtgcagttaccagatgaattgtagtagtagtagttagtctgcgtacgaaacaacaaagattgatatgtgcaaacaacttccacacaaccataaatatacatttcttgcaatctttacacactcgacacaagctcatcctgtcattcattcagtcagtagtcagtaggtacgactgaaaacgaagctatctccctgcacatcctgattcgccttaccttacgtttcaagtcaaagcatgtcgtgagaaaatttatcggatgtctgttcgtttgttcgattgtttgtttgttttctacgtaccaaactctgaagcgaaacgctcaaccaccagctgctgcaacggtgcttcaaattggacgagtggtcattgctgaaagagagagaacggcattgcgatttgcagcatattcagaatgttcatcagtggtgacagagctcgagacctcgatccgtatgtgatatgtttgctacttaatacagtagttagttagggattgcatcaaaagcagaaaacagaatgcaaatgtgaggttgttaatgtgaatctagcgcaggttcttttaggaaaaaagatggctagttcggaaaatgaggacaggccaaggagtaggcaaatatactagaaggacaaaacagagagatccgagcaagatatgttcgattcttgctctcttttctactctgctttttgtttctttcctcgattttactcgcagatatggatagcaagcaggtttgcaagtaaaaggtacaaacagacaagttaatcacggtgtgatacgattatgacatcttggggcatcataatcagtggagagcagatctttcgccctcaaatatttgcaaactgtagccctgaaacatccggcaactatctgacacaacagtttgaaaatgaaaatgattttgacagagcaccaccgaaaaattgactactgatgtatcaaggctcagcaacaacaatcgttgcttggtgatcattaacatcacaaccaattgaacaggagtgacaaaggataatgacaaagctgattcttgaaaatgacagcattccactgatatctctattctagtagtaattactaggaaaacattttagtaataattagcagtttttttccccgcacagcacatagcaaaaataagttgaattagattttaatacccttccttttgtttgtataaacttaattttatattgtacacaagcatatcgataaattacaccgttataacgactcaccgcgatcaaacagtgcacatctatctctttttctctaatttaatgtgtaatttctaaactccaattttgccatttggatgacacgtgaactttttactcctaccgataacagaagttacaacgtgttgctctgccagtttctctgtcagtagtgttcggtaatcatcattgtcactcctctcttgttacagagaccaatcccaatgatggtcaggtcagatgatcggcggcggcgacgtctcccagacgtcgacgacattctcctcgttgtgcagggcgaagaggcggtcgccgccgatcgagaagtcgcagatggcgccggcgtcgctgccccgcagcgtcgacgtcagcacgtggtcggggccactgaacaccgagatggtgtcgttggtcgacgcgaagagctggccgccgtgcgcggcgagcttcgggtagcacgtctcctcgccgcgcggcgccgccttcttcttcctggcggcgagcttgctccgcgacctccaccgcacgccgccggcgccgccgctgctccggacgtcgaggaacccgaggtcgtcgtactggttgatcacgcagagcgaccggccgtcctccatcgcgatggcgtgcagcacgtgcttgtcctccagcgacgccggcgtgccgacgtcggaccacgaccaggcgacgttcttcttgtcccggaagtccagcaggctgatgaaggaagagtccgtccgcgggaacatggtcgccgccatgagcgtgctcgtgccgtcgagccactggagcttgtcggcgtcgccgagcgcgcagcccggcggctcgtagaagaagtcggcctgctcgccggtggtgcagtcccagacgccgatgccgtactcgttgaaccggcccttgcagctcgcgaagaccttgcaccggctgtcgaaggcgagcgccccgggggtgtaggacctgacgtggcgatcgtgcgcgacgcggaagcggtggcgcaggtcgccggtgagcgcggagaaggccgccacgccgccgtcgcgcctgccggtgccgggcctctcccgcgcggcgacgaggagcgtggcctcgtcgaggtaggccgcgtcgttgaccggcgcgtggtcgaggtgcacggcccggcgctcctccatcacccagttgtacacgcgcacggcgccgccgtgcgcgacgcagcagccgccgtcgggcgcggcgcggacggccgtcccgtcgcccgcggcgctcccggccacggacgccgccagccgcagccggtccccgtcgaacggcccccaccgcgcggcgcggacgcggtcgaggagaccgtagtagagcgcctcgcggcagagcaccccgtcggcgacgtggggcggcacgtggagcccccccgtgcggagcaggtcgagcagcaccgcgaagcactccgggtcacggtcgatgaagtactcgtccgcgccaccctcgccgtcgccgtccccgccgccgccgtggttccaggaggcgtcgatcatggcgccgagcatggtgtcccggccggcgctggcgagcgtggaggccatcgtctcgaacacccggcctccgacgttgagccgcacgcggccccgcttccccttcatggcctcgcactcgcggggaggtggagagcgagtggcgcgcgcgacggtttggtttggttggggttggggttgggccacgccctcgcgtcgcgcggctgcagtggtgacgcggggcgtttttgcagtgggttcccgtataaaacgggctcgcgcgcgtgccgggccttcaggtggcgggcgggtgaaccggcggaggatttgatcgggtcgcgggagacgtcacccaaccccacgggtatcgcggccgttgctttcacgcgagacgggggggagtggcgttcggggttggggattacggtgggggcggcgcgagcggtggtggatttgggggacttttggggcgcgtggtggcgtcgtctccgcgactcgccgactcgggtggcagcgcggtgaacggcccaagtgagcgaggacggggtacgagtccttgtaatggtcacgtagtggagtagaaagttgtgtttgtgtgggtcggttggagttggactggcacgttgcacgcggtcggagagcccccacgatcccgaaccactccccgttctaccaatgcgcaccacggcactacgtagttccaagctttaaaaagaaatgaaaagctccaacattgccgagtccaactagtgctaccacccaaagaatttgtataagtataactacagggcgctaagggcaggtacaatagcatggtataagccagctataagcatattttaaagagataaaagaagagatagaagagcagcgggctacagatctgtagccagttgcagcacggactctaagacgtaatgtgtgtatgacaggtgaaaccatgtattaataatatacttcctccgttttataatgtaagtcattctagtattgcccacatttatatagatgttatgtgtgtctagattcattaacatcaatattaatatgaaaaatgctaaaatgacttacattgtgaaacgaaaggagtagtaagcaactattgtatgaattagctattacattggttatagatgatttggagctagtaattggctatactattaaacttgctctaatgggagggcggttcacagttagcccagttccggaagaccagcggatgcggaatttactggagaatcgcctctcgctcgtaatcccataaagcacggcctttttgtcatttaacttccccgcaaataaaaaatattggattgaacttttaaagagatgatatgcactaacctaggatatgttaggcacgtagctcaatcatggccttcgtttcttctggctgaattcaggcagcctcacagctctgcaaaggacggaaaagttaacaacgctacgctagctgaatcatcatcctcatcatcaaggataaaaactgggactcaaatggcacatcccgcacgcgttgttgccgatccaagcgaggcatgcgaggtgataggatcacccgggtcccggggcgacgaaaaattgtgcaaagaaaacgacgcgtcctgcaaaagggaggtgagctgatcaagcatcgcacttactaggtcctatcctggtcgactccactgtcggataacattcacaatgtttcttgtctgacgagaccgtgttcttttcgtttttgaccggcgcaaggcagtgcatgaccccgttataaaacgacggcgaccatctattgcaaactagacatggacagctgccgaatcccgctatcgcgtctcggcttgaagagagattcaattccaatttcagttgactcttatgaagatatatagagtttactagtgtcaaattgaccagtaggggactgaaacattgcaaactgaacagtttagacctaaccccttgaccgatgatgcttcccagatgaccaacgaaatcataagccgttgtttctgaaaaattaggtgacgttcatcttgtaacgtgttagttgaccactgaacatcttttctgtcgacttggagatgggatagttgggagaaataatggaatagttgacctggttagtgtctgcctccgctatggcatgagatgagaggagacgacgagacgaccgaccaagtcaatactagttgataatggtcgtgccgtcatggacttggtagcccactagcccgaagaggaacaagccgtgtggcctcatgggtatgcactatgcagtaatctgaacctcaatttccagacgtttgtttccataggccatgtttagttcattggccaatttttttttaagtatacggacacacatttaaagtattaaacatagactaataacaaaacaaattacagattccgcctataaactgcgagacgaatttattaagcttaattaatctgtcattaacaaatgtttactgtagcatcacattattaaatcatggcacaattaagcttaaaagattcgtctcacaatttacatgcaaattgtgtaattgattttttttccacatttaatgcgtcatgcatgtgtccaaacatttgatgtctatttttgtccaaaaatttttgggatctaaacacacccatagccactgaacgaatgcacaggggccaattcttacatggactgttattggcttgttgttaccactgttaagactaaaatatagctatttctagaatacaaatttgttttaaaatgcaactatttcttcgccaaatcctctcatcttaaccaatctatccctatttaatttttctattactttctcttctaaatcaatcataacctttcaccattcatttatcctatctaattccttaattcctgtgaaaaatctaaagaaatgctttacatttaaggttgaagtggcaacatgcaatctctataagttgtgataactttttacgctggcctttatcgatgatataaatgattttcatccaattccaattgtaattaggagtggccctttaggtttctccttccattaaaaatgtacctattttatattttggtttttccaaataagttagttatatttgtagtcctccatgtatctaagatttaaatgaagagatatattaaatgtttgatcaaaactcaatgaactatcttaaaactatctttattacatgtaagataagttaatttctttttagttttagtaacaaagtaacatgtgcaactttttgaatgaagggagtagagctttaaggcttagccatacctctcatggataatgctggaagtgcagagcttagccaggccgtagtcagcttcaacatggttgcaatctgcgacagggagatcgctgcttccactggcatatataaaacgttgaacagaataacataagtacagaattaagtatgccaagataaacacaatgagacaacctgacagttgtgaaacaacctgcagagatgacagaaagcagttagcaataggcatgatctcccaaaagagacaatagacgaaaaaaaaaagagaagataatgtatactctactcgcagaggaatatgagctctgaaaaacaggatttcttaatggtgccaggcagggctgacagaccggcacattagctacaaaactcatttgctcatatggcctaaataaataagacatcaacaggctagctacaacatcatccgacacaactatgatgtcattggcctcttggcaagcatggggttcaaccaaccattaaaagttgcgcacttgcgcctaacatcacaactacagcatttttatcttgtctacaacccctagttaaaaccgctacatgcccaatcagttggcattccaataggtcacccgaccgaagagttacaaccacacagggtgcaatgttttaacaccttttgagactaagcgaaccttttgagtctagagagcgaatccatgtacaagagaaattagcgggtaacttcaagccttccttctgcgcttcttttctccagtagaagcgccaccagcggatccctaacttcaagccttccttctgcgcttctttcctccagtagaagcgccaccagcagatcccccctgctccacttcagctgctgcctcgccttctgcttccttctgcttctctttctcagctgagacattggccttagattcctcaccagccaccgcagcaccggcaacctttggctttcgacctggcttggctcttccttcacttggtttgctctcacccttcaaatccttgcctccgctgctagcctcctttggtttactggcactcttgttgctaccatcctcaggcaaatcatcctttgtcttctcagttgacttagtggctttgtcttcggatccttcttcagcttccttcttaaggtcactgccaaccttaggtgtctcattttcatccttccttgcagctttcccctttgatttgcttgaagttgccgagatgttacttttgggtgtaccattgctggaacctttcggacgacccctttttttgggaagatcgcctccaccactgccattaaacagaaacataagtctcagaaaatatgtagtcaattgtctacactgcttctttgattaccaaattaccttttaggtgtttctgcatttccttccttcaattgcactgagctccctcttccttttctgcccctaccccgtggcttcggggaacttgaaacaaccagtaacacaaatttatcaaacaaaataccacttgatgcaaataagtatgacaaattagtcacaggtttcacaattggaataactagggatgtttgtgggaatcccatttacttcacacctggaccaaacggtgttcaatttagtaatttttgagttaatttgcatggaaacgaattaggatggacccatgggctggcacaacccgacccagtcatccctagagaaaactaggaattattgggtgtttgtaaggaatttgctgaattcccaacacagtcaggacagcagacatttctctacagttctttttaccatggccaaattatgacaaaaaaaaacttagcctattcagcaagccaacatagcttataacaataggaggtgccaagcataatagaactcaagaaactggagagaaataaatcattaaaaaatgcactggatgctacgattgaaaaccagtgattgaatcaataaaaaacttgaactgtatagctaccataaatgcaaagtaaaaatgtgattttgaagttgcaggtatggaagtggtgtcaagataattcacttacatctcggaagccacatcaggggttttgtcttgttcctgatataacaactgctaattagtttaaaaaaaaggaagaggagaaagcagaatcacaacattaaatgcaatctaagcagaatcacaacattatgtgcatacctcactgacgaattcccacttttcatccctaaggagaagcacctctacatctccatcatcatatgcaatctaagctccaaaagtacaaaaaatcaaccatacaagaaaaacagaataaaacctttttttaccaagagaataaaacaatattttaattggcataagctcttcatgtaggtcatatatcccatgaaagcagatgatacaatgtacagggctcataccttgtgcctttttgaagctgtatcaaatgagtcaacaatgcccttgtaaaacctgcaaatatttaaaacaaaggacctcaaaattttgaaacaggatacaaaataacccaataaattgtaccaaagcaaaggacatgcctcatcaataatgagcaaatatattattatttgattaaaacatcaaacaggactaacctaaatactaagtcaatgttaatatatatacaccatttagaaaaagctacacagcagatttggaattagaacagcggaagaatagaaaggcataaagaagtaaaaaagatgagctagcaaatatgccgtgtgatgataatgtctatatatctggttagtttatatactccagtgtcaacatgaaacatggcaacaattgtaaaagatttagcatagagactaatgatcatatcacttacttcttgtcgtcaggccaccatacttggatccttgcaccaacaaggctagcatcaaggcctttattcttcctagaacgaggagtctgcagagggcatataaacttaagaataagaccaaaacataggagatgttaacaggtgtcttgagaaccaaacatcttcaagctcaactataattacgcttctaaaacattgttatgcattaagtgattttatcctaaatcacctgaataaactgggatccctattgaagcgtatttttttatcctaaatcagctattgaaggttgttacctagggtgtgcccagaaaatataatcaaatattttttaacacagatttttctaacacagaattaccagttttgaagttgaagttgttgcaacaaacaaatattatatttgagctattgcaacatcattctctacaagtcagattattaaacagaaatttagtaagcacattatcttttggcacaaaaagaaagcaacatgctaacttaaattacacctttatgagtaagcgatcaaatgaaatatgagcagagaaaagcacagcagacaggcaacagaacacagagaatcaactaatcaagaatgcatgcataatcaagtgcatacctcttgttcatcctcttgtgaccttttcctcttggagccattattgtcctggccttggctgcccttggtcttagctgaccccttggacacggactttggagagaccatttcctttattgagatagaacaaacagtacaacaaccagtgtgctaaaaagcaactgaatagatgctattaaattctatctgttttgaattaacatcaaagataggatcaaatcacaattgaaccacactaaataactcctatatactcagtgttatagcaaagtttacaagacaataacaggatttgaatcacaagcaactgtatcagtaaacaaaagctcgtaataccttgaaacagtaaacacactcaaaacatgtttcagatacacaaacatagcatgccagagagaaatagtattaacaaagactgaataatgcagcaaatcaatgctaaagacaggcagctttactaattatacaaaaaaattactactgacaagaaaattacctttaggctcagatccttagcagtatcttccttggagtcagtttcatccttctgtttcaaactgatcttttgttgcttttttgatgaccctgctccacttgcctttcttgtagatgacttggaatcatccttagatgactgcttcgataacttccctgttgaatcagtagtctcctcaacctttttcagacctagaactttctttccagcagccttcttctccaatgactttagtccaggaggtcgacctctttttgatttgaccatagctggtgagccatcaacacgttctgatgtttcagcagaagctccattggcaacctttgctgactgcttaacaccatcctttttctctgaatcgggattggataattccttgggattagcagctgcagattctgtgccttcagtaacaagattcaacatatcagcatcttttgtatttacagaacagtaaggttgttcaaggcttcaagcttatcctttggaggtgtccttaccattatcaactggagttgcaccactgccaatagcagtagtctgagtaacatcttgctccaactttgcaggttcctgaaaatagagatggcacggtgtattatcaaaagttcatttgtttagttgataaaaacagaaatgcagagcagcatacctgaggtagctcatcagaaatagtcctttcagaaagtttgccatcatccacctgaacattattaactcaatagtaagaatagatgaatccacatcaagagcccatgtggccaatttgttttccagtttcaacgataaggtgttgaaatgagctgtatattaagttctgagactaatattcacaccatcacaaagtacacccgtacactctatagactaaagccaatcacaatttcatcttccaagtgatccattccaatataatgcagagagcattaatgaattcaaggcgtatttcaaacatactaaaaaaattatacacataatgacctattctaacacctatgattatcacatagaagtctaaggtaaaaaagaaacatctctgaatattagttgctgcatgttagtaattcaactgaccacatcttttccagaaggatcagcatccatgtcttccttgacatctgaactgtcttcacaaattgttgcgataatattgtcatattcattcaaggaagtgcctttaagtaactgcagaaagaccggtttcagtttttcagagcatgcacctatcaccttctctgcaagttcaaaagatgcagcagaagtttcctggaaataaaaaccaaatcaattagatggtatctttttgtctgggtaggaatgtagattcatattgttgatgtcaagaaagttaaaaacatatatatgtaccttcagttcggacttagcatgcttgagcagacattctgcaatgggtatctcaacttcatcatcctcttcaattaccaaaatcattattgtagtcatacagtttgtaacattttctgggtgatttggtctgaaatatgagacaagggatttcaaattatgagtgtacatacaaagcatacaatgcagacattaaagtataatatctaacaaaaatgtgttaattatcaactggccaaagtagtaacacaagcaagttatttaggtaaaaacaatgtaatcatgaaagatcttaatattggcgatttagctcagactgatgactttaaatacagagtatataagaagcctataagaaaaacattgaataagatctgtgcagaacagaacagccaattgtataaaaaactatctgatattcttgttcttgaagaaccgttacaggtaagaactatgttaaggaaataaaattgactcatttagcattcttggagaacataatttagcaaaacttacttcaaacttatcatgagaactagcaaatatagatgaaattaagaacaaacgaagaggtacttacttcacagttgtgaagaagttgtgaaacatttgcagtatcagatcttcacactcaagatccaacatcaccacgcatagccggacctttgccacagtttcaaggattgcaactatccttcgaaacaaggggttctccatatcatccaatttctcaaaagaccccaccattatggaaaacacgtcctgaaccgaaagtagatagcacaggtcagatgtcaggatataggatatcaaaacaagatcatcttcatccgataagaaaaaggtataccttcatgacatcatcgtcatatggagtgtcaggtgcagtgatcctagttatctcagaaatacaggacaccacagaaagtttcacctcatagctagaattatccaacagctctttcttgatcaaagctttcattgctggagttatagcactaatcatgctttcagaaggtgcttgttccactttcaatatatatatttcggcctcctgcatgaacaaacaatcatgccaatcaaagatcagttttctagggaaccaagaagatcatatatgctcttaataaaactgtaatgttaaaggagtatggtgcatttacaggaatcaacaccacggcaaactccgtatatcaacaatccaactccatatgtcaacaaacacgacggaaaatactctagaaaaacaaatgcttgctctttgtgccataacggaaaatcaaacggattgcagagcagcagaaaccaaaatgaatctaaagcggaattccagtccagtaaaaatcacgactcccaaccgaatcaatcctcgcggaatggtatcaagccaaagcttccgaaccatcccgaaatcaaaccaaccatcccgaaaccacgcaatcaacaggattaataaaaataaataaatccaacaaacagcagaaccctgacaggagaggcaaaaaaaaaacgtttcaaagcgaacacaaacgaattccagcacagagagggttagagagactcacgtggatgagcttgagcaaggcatcgacgtcgtcggggggagactggagcttctccccgacgtccctcagcttcccctcgagctccccgagctccgccattcccgcgcgcgcggcaccccccgcgcgtcccccccctgccaccccctggatccggccgcccccgccccgccccgccccgccgcgcgagatctacggcttgcttgctagggtttcagcggggagggaggagcaacgccgcgcaccaccccctgcccacgcgcgcgcgaggcagcggccgacgccgacgacggcaaaccaaggtgacgggaagagaggagaggagatggatttctctatagctatctctgcctctctctctctctctctcccccacacccaccggtccccttttcccctccctccccccgtgcgagacgcgatttcggtgcggtgcggtgcggcgcaacccggaggtgggtggtggagatgtttggaatcgggcggggcattttatgggcgcgacccggggaggggttggggttgggcctcggccgccaaaaaacgaacgggagcggacgcgtccgggggtgaggagggttagggcgaaaatgtgcgcgggtttgtgcgtccgaggtgcgccgccaagttttgggggtctagcggacgggagtccccaggcttgtctgaggcgatctcggccgtcgctggctcgcgatggagcggggggcagggtggatggatggctggggaacactgctgttccacggccgccgaaaatggcagtccgtaatcctcggcccaggtacatcctcggccctgtgacaataggagggagagagagaaaataaaaaaattgactcaccggagtacgcgcgacacggcagcggaggcgttagagacggaggcgagtggtggcggcgagagaatgaggtgagcgggggcagcgtgacgaggcggtaggggtgcgctatgaacgagggtggagtatcgttgttgttggtaccggcattggtggaggggtgcgggggcagataagatgggagagagtgtagcggcgcggacgggtgcgtctgaaggtagaagacgacgttccgagacgaagggtatatataaaggcgggagagaatggtgaccgtcggattagtgtgatctaacgatcattgtttgtaactgtacgacgtatgaacctgccataaataatatgcttattttgtcatgacgtatagagttacgctcgacatcagcccaccgaagtaactttttgtgaagaatgtgggacctagaaatattcaaatgctagattgggcttggaaaaaaagctaggcccaagtctgattctcttccaggaccgcatctttcacaatcaccaagcctaggtccccatcgacatgcatcatttggtttgctcgtctacacaatagattggagcgcgaaactttgaagtatatataggtcatacttgcaccattctttggtacacaacttcatcataaggccaaaaccatctgttgcttgacttactccctattgaccgatgatgctctcccacctcttggtctgcctcttgtatcacctcttccttcatgtggttagaacaatgtcctacctgactcctctattggtttacaacaccgcaagacgatagaacccttctaacctagtataaggcctctacgtacgaaccaaaaggtttgttcaaattaagaaacatttattggttcaattgctcgagtatttttgcgctcacattcacgattgccatgcaagctcaacttaaatttgcgttgtagatacaaacattgggagaaaggcactttttcgaaatggtgcaacctaatgtgcattgctaaatttgcaatggtgtacatatatcattatatttaatgagcccatgataaataatgcttctttggtttatcaatgtttgactctacataatggacgtggatgtggcacgccgtcaaatattgatgattagagtctagatgtagtattcctactctgtcgtgttgtgtatcataacacacttgaagtataggaattgatatatgtgtgttttaaattgcaaggtttcttatattccatccattcctaaatagtatacaaacttctagcatttgaatcttatttcaaaatataagattttatagcacagttcactgtactatttatctcatcaatcacctcctattcaaattttattcccattttatcccctacctaccctctcgcctccactcatctcatatttattgaggacactaaagtattttcctcttaacacagggatggaccaaaaatggaccaaggtctaggccatcccatcaaagctttggcccaatccatactatttatctcatcaaccacctccatttaaaattcattcccattttatcccttacctaccctctcagctccactaattacatatttattgagggcactaaagtcttttcctctcaacgcaggggtggaccaagaaatgggccaaggtgtgggtcgtctcattaaagctttggcccaattcacttactatttatctcatcaatcacttcctattcaaatttattcctattttatcccctacctactctctcacctccactcatcacatatttatcgagggcactaaagtcttttcctctcaacacaagggtggatcaagaaataggccaaggtctgggccatcccatcaaagctttggcccaaaccactgactatttatctcatcaatcacctcaatttaaaatttattcccatgttatccccctacctaccctcccacctccacccatcatatatttattgagggcactaaagtcttttcctcccagcacaatagtggacccataaatgggccaaggtatgggttgtcccattaaagctttggcccaattcacttactatttatctcatcaatcacctcctattcaaatttattcctattttgtcccctacctaccctctcacctccactcaccacatatttattgagggcactgaagtcttttcttctcagcagaggagtggaccaagaaatgggccaaggtttgggccatcccatcaaagctttagcccaatccattgtattgtttgtcagggttatagataagacatacctcttatccttagggttgtgaaatatacgaatacgatataccctcatgtgtatgggaagatacctccgaaatgaggaaatcggatgatctataaggaaatcatcctcttcgaatagaaggtgttagagtccttttcggaggatataaggatttttgtgatatcgtgtaagggcaggtgtctctgagttctactttgaggtcaagataatcgacagtataaatagaggacccccggagggggggggtaaggcatcgaatcttagggcaagacacccgccatagcagaagcaatctggaggactcgaatccaactcgtcgataggtctcgttgagccgttcttgacgaggatctcgtcggtaatctcgtgattccgttgttctctattgtactatttgtggttttcttcataatctcatataaactggattagggctattacctcacaagaggcctaaaccagtataatctttgttttctatgtgcttgatgtcgtatcttgtagatcttcatatcaacgtacccccaatacccttagaatacggtccgcgggtatcacccgtcgacactatttatctcatcaatcacccctattcaaatttattcctatattatcccctacctaccctctcacatccactcatcacatatttattgagggcacaaaagtcttttcctctcaacagaggagtagactaagaaatgggccaaggtcggtgccatcccattaaagctttagcccaattcattgtactatttacctcatcaatcatctccatttaaaatttattcctattttatcccctacctaccttcccacctccacccatcacatatttattgagggcactaaagtcttttcctctcaacacaggggtggaccagaaatgggccaaggtatgggcagtcccattaaagctttggcccaattcacttactatttatctcatcaatcacctcctattcaaatttattcctattttgtctcctacctaccctctcacctccaccatcacatatttattgagggcactaaagtcttttcctctcaacaagaggggacccgtaaatggaccaaagcccgggccaccccattaaagttttggcccaacaaagtattatatggtggaatttgaaagtgttctatggacctttcatcctgggcctcgggctgtggcatatgtgacacatgatgtatgtttgcccctatcttaatattaacctctgcttaataacctagaaatctttttattttgaaacggagcagcatgctctatctctctagcaacttacactaatctcaatgcaaagcacaatcccaaattattgataaatctctaaccggaggccgaaggctttctcttccagataggaattatgtttttcagtactgtgtgaaattgggattcggatgcttcgaagagaacgtagtactggcctagctcgacatgattgatgggcatgatgattggttagggtcattcaaggctttcatcgacaaatcatgcatgacacatcaatccatcttgtctggattgttcattaagggctggtttggtttgaggcctaaattaagcttaccaatatttatcaatttcaatagtgtttagtatctatttggtttgaagccaaattttgacatgcctaagaaaataggccatttcaatagtgaatttagactattttggcttcaatccaaacacaactttaccttaccaaaattattcatgccaaaacttgctaaaatttggcaccaacaaaatttggtaaggcctatttaggtcacaaaacaaaccaaccctaatattcccacaccttgtttagttccaaaataattcttcaaactttcaacttttccattacatcaaaattttcctatacacataaactttcaacttttctgtcacatcattctaattttaaccaacttctaattttaatatgaactaaacatagccttcatcgacaaatatttgctgctcctactgcaattggagacgagacaccgtgccttctcgaccaatgtgcttgaagttggagtcaaaagttcactttttaggccgagtttagttacaaattttttcttcaaacttccaacttttccatcacattaaaactttcctacacacacaaactttcaactttttccgtcacatcgttccaattttaaccaaacttctaattttagcgtgaacggatgagagcccgtagtttcccactcgatcggaagttcaatctcgctgcgtgtctccaaagtttgttggaacgtttaaatcggatttcctctatccgaaagattacaacttctgacagggaaaatctacagctttttttcgaattaactgaaaatccccaccttgaaagttcgttttgctcatgtgaagtaacaagcgcatagcagtaaaatacgccaaacaaaaatctaaaaatagatgatggccgagttagtgatctctaaatatttcaagaatccccaaacaaaagcttcgaaaactcaaaaaagaacaaataaaattggagcaaacagaactctctctcagtctcactgaactactgaagaacgagtaatactgcatgatctgaaaagccggcatactgacaaagttcaacctatctaattattatttattcatcattgatcagtacacattttaccaattaaaccatgaactaaaattaagcacgtgtaagagttcatttccattaattcctgtaaagcacagcattacaaacacacaatcacctcaagaacacactcacaccaaaagtccattttattctccactgctactgaaggcaaattcatactatagctatacatcgtcgtcctctgatccatccatcggccgctgagaatttctcgatcatttgccgaagagcgacttgaaccaccacgtccccttggtgtcggtgggcgcggcgtcgctctccggcggcgggtcgtcctgcggcgtcttgcgcagcttctcgacgtcgtacccttcctccttggccttctccagcagccgcccgtacacctcgtcgtccatgctcgtctgccggcacaggatccacaggtccttgcgccgcggctcgccgacgagcgcgtactggtagtcgtcgtcgacgtagagcacccagtagtcgccgacgacggggatgacggggaggaaggggggcaggtagaacttgaccttgagcttggcctcgtcgctggccgggtcggccttgtaggcggtgcccttgatgtagtcgcgcttcccgctgctggtccacgtctcgttcagcacgtccaccgtcgcgccgtcgggccgcagcgcgtacgtcgcccgcgtgtcccggccgtcccggggctggaagaagttgggcagcgacgcgatctcgtaccaccggcccatgtacctcgccacgtccagcccccgcaccaccgtcatctcgctcccgctcttcttctccaccgccgccgccgccatcgtcgtcgtggtgattgtgttgctgtgacgatcgatctagctgcgaactactgatgttatctgtttgatatgaattgccaacttgagctgagttgagctaattgcaaggatgagtgtggctatataggagagggttttggcctcttgggggggttgggtttggagaagaactgaagaagctagagaggttagtatagaggataagattactacgtggagggctctggagcgcttaaaaacgagcgctttggtttggttgcttgctccttggggccggccttgtgctatacgtggagacttgcacgtgaagctaacttgcatggacgtactccgtacatctcttttactgtgtgcttttggcggttttctggccgttttcgtcggtaacttgggactggggttcaacctgaaaatctgaacggcgagtatcactgcaggattcagagaagacagtgatctggtttcacacattcccactaggcgctttccctgctacgagtacgagtacaaaccaccggaatgctcgagagcagtccagaacgacccctatggtgatggactgatgtgtgctcggcagatagctttggccgagtctggccttatttagttctaaactttttctttaaatttttaattttttttatcacatcaaaacttttctacacatataaacttttaacttttttatcacatcgtttttaatttcaatcaaacttttaattttagtgtgaactaaacacaccctcggtgtgataagcatgttttccttgctccccaaggttaaaactctttctagcacaaaagaggtagtagaagggtacagtctacggcatggtagattgccagtgtgaagcaccgatcgtaatcgaggcttggagctttgtccgtgtcgctgtccaccaaggtaagaaggtaagggtcttattgcttgcgctatcacttataccagtttgttgccaaaatttaaattttgaaacttttgatttagatgccttttcaacataaattccttcaatattggtttttaaattattaagaacacatatttaaaagttttattcatatttttttattactagttaataagccgttatggcttatataaagtggtaagcaaccaatgaggacctaaatcctattgcatcggatatccggaaacatgaacgtccttttcgttgattttatagcttgcttacgtgtttccatggggttccaatccttggatggtttcatggcttggttacgtgtttccatggggtagttgttgacgaaaaaaatcgaacacatcggcctgagagatctgcttagctccagtgcaggtccaaatcttgatgaagtgcgggcgtgccagtcagtttgatcctgcaactgacaagatatgcaaatagtagatcaaaacagccgatcggctgacaagccgatggagtagttctagccgataatagccgatgttgataccagccgatagcgatagggtttaagcaatcggctatatgtccaaagtagataatgatataaaggcaatcagctgatgatgatgtaataaaataacaacataaaccaatcggcaaataatgatatgataaataagcatcgatccgaaggttaaagcacacatcggctggaggtccgatgtcatgaaatccacaagattagattaaacagtgaaacctttgttgtcatcggctaaatccaacttatatgtatatgcaatccttatgagccgatgcaacgttcagataactcaccgactgaaaccccgatgaaaccctgattggcaatcaagaagcaggctagagattatggttctaagcacgacttagtagatcaaacttaactgatgcagcactaagtatgaaaagaaacataatatctagacaatcaagccgttgactgatttttcagggtggtagatgcctaagctaatctaatctagcaacacaatttagccaataccggcagaaaccctaaaatgagaagcagccgatagagctaaattgatatgctaagactagattaacagagacatatgataaataggtaggcaaatataccatccaaatcagagcaatccaagaggtcgaatgtactgatgcagccttgaacgacgccgacgtagacgatacaattgcctgggccgacgaaacattggacttaccccttagccagagatcaaacaccgatgcagccccgcgtcaggtgccaagtcccgccggacgataaaataaagtagaaaaggtaaaaggtggcgatgcgccgaattgtattgattgtagcgatagattacatagaccctgggtgtacatatttatacccatgggttgatacaagtccttgtcggacaagaaagaaactttcctaaagataaaaggaaaagataaagtccttataggacactaaacacactttcctaaagataaaaggaaactaacaaactattcctaattaatagataacttgccatgccgcattctcttcgaactcagtctcttctggataagctttctttggtagattagtttccttaaccgaatatagcaagaatccgacaactgacgacttgacaactctcatcggctaatctcaggacttcgaagccgatgctgactctaaaccaatgactactccgggcttaccaaatttcactgttaacagtagtagatacgaaagaatccagaaagtcatcagagtaagcaacacctccgttttagattttagaaccgcaatccccttcatttcccacaatcatgtttgtgtacatgacacatgaattgcacaacaattaattcaacaatttagaatcgcaattcctacacctctctttcaacagtttagcaccacaattgaatgttcagtcattgatactttcttcgggcaacagtgaatgccttctttcctgcacccttctttgaccccactaggagcttaggatgaccttcaaaacattgagcctcgcaatcttggacagtggcctgcatgggcacattagcaatgcagtcataaccaacatttagcaatctactatatgcaagaaaagcttttaatgatttgaacctcgatgaaagttgtgttaacaaggtacattttgtggtatagtcaatcaagcatatgcaaatatttagataagtttggaatcgaacaccctatgaccaaatgaaaatactaattttgaagcattttttatatgataggaaatggtattaagcatagtgcactagctttcttttacctgcactgcccgatgatcacatgatctcgttccctcacacgaaagcatggggaaattaatgttcgcattgatattagggtgtctcttctcatacctatcgatggaaatggaaatcatttttacaacatcatattatgtgactacgtacccaagtgaaaaaaataataattaaaaacaatgtagacttgcttgcctctaatacttcttgacaaagtgaagatagttcctacttcctacaatgatgatagtcctgttcattttagcattgtgtcgtgttctagcttgcaataatgcaactactaattgttaaggtaccggtgaatgggcatttcttatcaatgtaggttcttagaacaagcaccaaattaaggacatgtaaaacttaattaagttcaatataaatttctactccaatactcactctatcctaaaatataacaacttttagctatgattctagacgaacactagttcagattcataactagaatttttcatattataggacgaaggcagtacattatataggtaaaacacatcaagaaaattactagcaaaacaaggaaaatagacaaaataattactataacaacaacacaaaaatgaatgaaatcaaatgagcttttagctagatttgtcaacgatgaaaataatagtcacaatttacaaatgttgaatgcaaaaataaaatcttcaaagttaatatctatgtttagaagaacaacgagagcatacatttagatgaaactttgagaaagaaacacgagcacaaatagtcctgagaacaaactagaaagctatgttgcacacaattattgggagtctaggaggcaacaccacatcaatggcgtgacaactaaacaaaagtttatataaaaaaaataacaagcagtgaagaaggatagcgcaacttcaaatgagaggccacaccaatggacagttaagaggcattaattcaaactcaaaatgaatactccatccattccattatacaaggcataactgttttttttttcaaaagttctataatatagggcggcagatgcagcagcaccactccgttagtctcgtccacgcacatgcatgcattgaaggcagttgcatcggcatctctttgaatcccgtaattctcatccgcgcatgcatgcagtaaacactattcgttagtttgctttggttgttttaaagacccctaattctgcggtaattataggagcttccttggtttttgcatccaaagaagttacgccttgtatagtcaaatggagagagtactagaacttcagatatagggtattagatatcctaggaagaactatagcatattttagttcatcaaagaaaaaaaactctcaagtgagcatcccctgcaacactaagtcactagccacttgatatagatcacacttacaaccaacaaaataacaacatcaaatttgttgaagtcacataccctatatgatgtctaagaggaccacaattgaaaaggtatcaagccaaaataacttataaaatacaagaagcgaagtactccctccttccacaaaaagttacacttattactttatcaccaatactaaggagaaattaaatcatcttgcatatatgtaacaaagatcaaggagtatatgcacacatgcaaccaatcagtattaagatgactcctcaagtttagttcaaacatttaatttatctcgccatttaagttttggatgcatagagactgcaaatacgaacaacttatttggaaaaactaaaatatgaaatatgtctaaatcttacatgtagagagagtactaaagaaattgaagaggctatcaagctcttgtggatagaaggagtattgaagaaaccgaagattttataaaaaatgcattgttttccggtttgaaaagtacacataagatatataataaaaaacaaaggggacctcaatagaaataatcgaggagttcttgttattatggtatagtacttctaacatggcatataaacccatacattcaaggcaaaattatagtagacttttaggctttagcaaaaacaaggaaaataatcccagtgcccttatccaggacgtttgtatttccagttctccacgctccaaatgaaaaaggaacaatttgtcttttgcgtgtatggttcccactttcccaggtccactacaaaaccggggcaagtccgcgtctcacgaccaatggaaacgcccattaatggcaagcttagccccccgcgctaatcgcctcctcctactaattccttgcgtctcgcttcggccaccgcccaccaccacctcctctcgcctctcgcccccgcatcgccgcttcctccctcccccacctcacgagaccgttttttttcttttttttttgtgttaccgccatggccgccgcgttgacccgctcgtcgtccgtccgttccgccatccgacggctcggatcctcccgcgccttctccgcatccgccgcggcggccccgcgccgcgacgcgaggggggcggcggccgcggcggtggcggtggctgccgggtcggggctggggatctggctgctgccgccgtcgccgcggccgctggcggactccgggcaggcggggaatgaggtggcggcgttcggcgacgtcgcggaggaggaggagcgggaggagaagcgcaggttcctgttcggaggtgagggcatttgatttttgttttttttattgttcatgcgtgttgttttgggttgtaatgcgggcgatttttggcgcgtttatggcgggggagagcgactgggtttcattcccattgttttcgtcgatactaattttgcgtgaaaagcgaatttgtccagtagtattttgctactcggttattcgcctctgaaaaattttaaatccgctattttacaaacggcacgatgattttcgtcgcaatgtttcctcgaatgtagactcgtatcgcagaagggtgttcttcaactacgagaagaggattcggacgcgcagccctcctgaaaaggtagcgaccaatgtgccatattcagagcaattttgtgtatacacaacatgacatgataattcttcttggtttgtgtagtaataattgtgtggtgtttttactgcaagatctttgaatatttcgcgtccatccggaacccagagggtgaagtttacatgttacccgccgatttgatgagggcggttgtccccgtttttcctccatctgaatcgaaaattgtcagggaagggagtctcaggggagagcgcaaccctggcgagctacactgtgccccgtctgaatttttcatgctgtttgacacgaacggagatgggctcatctcctttgccgagtaagtagcgactcactgatttgtgtccttaggcgtggtatctaatttcagaaccagacagaattgtttgcacccggcacaattattgtcatgtagtgatttacagaaaatgcaccaggttctattggcaagtagaacagtctgtttgctagccatattgggtttgaatcctcccttaaacacattgtgtggaccatacattaagttgccataagcataacgtcattgcaactaataatcaccaatgcttagatatgaacattttggttaatgagtgccactggtatggtatgacattaactttatatgctgctctattgttttattgaatgaaggcagaagtaacttgatgaatttgctgaaactgcttgccatgacaggtacatcttttttgtgacattgcttagcattcctgaatcaagtttcaacatagctttcaagatgtttgaccttgaccacagtgggtaagctatcctccagctcctcgacctggttgtaaacttataaccaaatactgtgctcttcagatctatatgcatctattccttaattgtacaagcaccttaaccattttcattaaaaaatgtatttcacttacaaattttagtttgaagtgtacttcattaatttatactaactgatgtttctttaattatgatggctgcatgtatattctatgatagcatccctacattctcttctcttgaatggacttgatcataccgtgtatagagcttacagattaccagtatgctactatgctccattgccaaacccccattcatgatagaaggaccttacagtcttacacacgagacctaaggaatagtccacccatacactaactatatatgtgcagcatcattctggtataatcagttttcccctatagcctatgccaaacctcaactctaggagtcctgcaaacaaattaatgtcattggtcactggcgaatgtatatcaaattctcagttaattactatcaacattgcatgcttgcaaggttgccgggagctaaataagaaagatttgacagccctaatctattcacttatgcatttttcatctaatttctgaactttattatttgctgaagcctttaaaggtactataagtatactatccccttttccctaggatttacacaaggataaattgaatatattgttgtttacatgtgacaattcatgtgcagttaaatttgtggtccagaaaagacctgcttttatgagcatgttcaatcatctcacttgttagttgatggtaaagaagggtatggacaatttggcaattttttttaatgctatttctttactctaatctggcatttgaatttcgcagggaaatagacaaagaagagtttaagaaagtaatggcactgatgcggtcctatcataggcaaggagctgcccatagggatggtttacgttttggtcttaaggttggtcagtcagtggaaaatggtggactggttgagtacttcttcggcaaggatggcaatgaacagttacgctatgataagttctccaattttttgaagcaattgcatgatgaggtgatttttttaaaaaaaattcatcctttgttccaataacataattatggttccgaactatcttattctgaatgcaacacatgagagacttgaactgaaagctaaatattttttttgtactttcatcctttgtttcattaacatcattatggttccgaatgatcttattgtggatgcagcatttcagagacttgaactaaaagctacttcctttcccaaaataagggattttgggtggatgtgacacattgtctgtctagattcatagcacttcgatgtgtcatatgcacccaaaatcccttatattttgggacggagggagtaaataatttttccagactatctaatcacataaggaagtaaaggagggtaggaaataacacctcgacaacccacatgtcacatccctaatataattatacaagcacaacatttgctgaatttccttgtttttatattttgtgatgtgttgccactgaagaacaacactatgcaaaggtcaaagtccaatgcctgtacattcattgatttgttttgtcctagtgtaattggagaactgtcattgtgttcttgctctaaagcagcatttcagaatccatcgaaaaccaaaagtgggatcaacaaagaaacataaagttgagattataaaccccagaactactataccacacccaatgtgttgtacattttatagaatgccccagtacaacataggggtaaaaaatttacttgctgtgtatttgtgtagcgggtatacgcgtgattaatctgttattgcctctggtccggtttgtcatcattgtatatacttgatatctcataatttttcattcaattatctgcagattgttcgcttggaattcagtcactatgatgtcaaatcatccaagacaatatctgtgaaggactttgcattatccatggttgcttctgcagatatgaatcacataaacaagctacttgacagagttgatgattttgatgattatcctgatctcaaggatttgcgcattacctttgaggtttgaaagtttgctatccagatattccaattgtagtacttgggtttaatgtctctctttatcatcataattattacctgaacttcaggagttcaaggcttttgctgatctgcggcgaaaattagaaccatttgcaatggcaatcttcagctatggcaaagtaaacggtttgctgaccaagcaggatctaaaacgtgcagcaactcatgtaagattcttcataattccgtttatttccttttgacataagatgtagtctgaatcagctaatgttaatgtaagtcttaagctattttggactatcactggcttgtttcatatttccagccctgtgctaactgaacagctaggtcctaggtcttgggagtaggaccttcccaagacacccacataattggctgcattttctgattgactttacaacattttttataggtttgtgaagtggacttgactgataaagtggtggacgtcattttccttgtgttcgatgcaaaccgggatgggagccttagcgcagatgagttcttgagggcattgcaaagacgagaaagtgatattcgccagccagcttcttcaggtttaatgggagtatttacctgtttgttgaactgtacaaagtgttctcttcagcagactgtgatctagtaagcctcttgataacccccaaagtcgtcctctgttgcccttggttacgacactccttttgatttcatatgctatacttgctaaatataaaatttcagcagcataattcagcttgcataaggttcgagtttgtgatgtttctttgccatgcgcaggtgctggggagcgaaaacgaccacccactggagttctgcaaacacgattttgctgtaaatagtcttgcttatcaaagttaccgaaacatgtagcagctgcaaataacatgtttcgcactaagcccaaggcttcgctgacagaactctactccactaatgtaaaatgaacctatgacatggaacctcgttaactgtctacgccttgattcagttactatatccttacatgtctacgtttggatatcaatcttgttggtaatgactaaatatgcaaaaatgaatcggtgataattgtgatctctatttggtagagaagctttcggtatgggctacacgacttgcaacaatatacatgatgttgagattaaggggcctaggttgttactaccacattttgtgcctaccgagtagtgactagtgagtactaaaggtctattgggaaaatataaagtgtggacatatgttgatatatttggtttttgcctttttgcaagacgttcctcccaagtaattgtccctttaccaacgaggggacctcgatatcccctcgagggatgaaaatagcttcccctttaccaagggggggcaacgagcatgctgaaaaacactttactatctatttttgaacataccgaaaattaaaaattaatgatgatatcgtcgaggaaaaacatattacacacatgttacacgcagataaataatcgacagcatcgactgatcatcagtaggggagcctgacgttgagccgcctgagccagatggagtggagcaccatgtggatcatgtcgaaccggcgcgccgggcggtggagcacgaagtggcgctgcgcctgcagcacccgggcgcgcagcacccggtacctccgctccgacacccgccgcaggatggccctcagctccggtatcctcgccgccggcacggccaccgacatcttgccccagtccagcacgtcgccgaacggcggcgggtagccctccgagatgatcaccggcacgcacccggcgaacacggactccaccaccctcgggctggccacctcgaagccgctcgggcacaggcagaaccgcgcggcggccatctgcgcgtggtagtcctcgccggcggggaggtactcgtggacgcgcatgtccccgtcgccgtcgccgtcggcggcggcgccgcccttgttcccgatcagccagtgccgtaggagcgattcgcggatgtggccgtgcctgccgccggcgaagaaggcgagcgtggtgcggttctccggcggtagccccgcggtcgggcgccggaggacgccgtcggcgaggtttacctccggcagcgtcgcgtccttccgcggcctgaacccctccgacgtgttggcgttgcacagcacccggatcgcgttgccgtacagctgccggtgcgcgctggtcaccatcggcgcctgcgcatcaccggccaacttagtttcagtgatatgatcgagacacaaattaattaattcttgcaggaacaaacttagagtgcttaaatgttgtctaaataatcataatttttttaaaaaaatattaaaaatatagattaatgtgaatatatcactttacaaacctacaagttcaaaaattcgaattcgttttctataagttctaacaaaaataaccgtttgaattcgatttctataagttctaacaaaaataacaaatataactgagaatatatgttaacatgttcaatttaatttgttgtttttattataacttgtagaatcgaaattaactttgtatatttgcagtgtgatatatctcatattatctatcttattatttttttatatttttataattatttaggtggtaatgtaagaatcaaaggatatcgagggatgaattaaaaatccatctccaagtggtccatacgtacgtacccagtcgtggcaggagacgatgacgtggtcggcgccgcgggagcggttccagtaggggtagcgctcggcgacgacgcggacgtagtcggcgacgaggccacgcagcggcgcgaggtcgccggtggcgttgaggcggtagacgtagtggacgaggttgcagacgctgatggggaggaggaaggcgtgggcgtcgtcggggcgccgcgcggcgaagcggctccgcgggtcgtccatctcgtacatgaactgcccctcgatggagtagatgtcggtgcccggcccgatgtgcgccaccggcggctccccttccctgtacgtccagatcttgaacctcctctccatctccacgtagctcctaatcgcaaatgcacatcggtttttgcaacaacggtagaggagtggatcgatggatcgacggtgtacgtacgtacctgtggaatgcacgcgcgttgcggtagatggcgccgcgcggcacgtagtcgtcgtcgcccgccgcggcgacgaccgtggaggctgagccgcggcggcggatgctctcgtcggacggcggcgtcgcgcgagccgcccggcggatggccgcccgggaccgagctaagccggcctcgatcttgcctcgcgtcacctgctatacgcaccaagccaccgatcaatgcagcgtgattttgcagtgaacattttccattcgcgtgtcacgtggcgacgtgcgcgagtaaattaccttcttgttgattggtcgagcatggacactcgtcggcggcgccttctggggttcgtccgggacgtgccgtagtgagtgctcgctgccgcggccgtcttggatgccggtgccggaggaaggagcgggcggcagcgcgacgccggcggctacgacggcgaggagtgctaaggcagtgagcggcacggcgacgcggccgctctgctccatggcaatgtttgcaatggctaagttagctgctgctccactcgtttgaattggcacgcgcatgtggccacgtttgaacggtaggccgcgatatatatatatatatacgtgttgcgtgtgcttgagttgactgatcccgtgatccgcactgtcagctcagttcgttacaatcgccggtgcctcctgagtttacaaaccttcgaaaatgtgcagcgacaacggcaacctatcgtgatctgcagctgtgccgcagccattgtgcatttgtgccggactggactggactgtacatttctgctttggtcatgttcagaatcttaggacgtgacggcctgatgggcagcgaaaacctgcttaccgtcactgctcctaacacagttgcaccgcctccatgcgttctacgagctgggaacatatactgtgcacatttcgtgcatacgaattagcaaatgtcacagtaaaaaattagacacatacttttaataatgttatgcatacatgtgaaattttatcttcaaatttattatattttaaccataacaaaaaagacaattctgacagatttttactcttaaaaccgtcaaaattttcattttttttatgattaaaatataatgaatttaaatatactccctctgttttttaatagataacgccgttgactttttctcacatgtttgaccattcatcttataatttatgtaattataatttattttgttatgagttgttttattactcatagtactttaagtgtgatttatatcttatacatttgcataatttttttaataagatgaatggttaaacatgtgagaaaaagtcaatggcgtcatctattaaaaaacggaggtagtaacactttacatatatgtgcagtactattaggagtagatgtctgtttttttttagatttgctagttgatatgtacggaaatcttgtatacataggatatgttcacctacgagttggaggtaatccatacattgtgccccatcgttcattccgtcgccattgttcccgtatccaaatgttggtctttcccctgtcaacggtctaagtgcttctgaatagcataatagtacgttgtccaatttattccttcagttccaccctgcatgctattagtctaataaacctgcagtaaaacagagcaaatgagagacagagagccaatgcggaagaaagaagaaacccaagcacaatgacatcacaaactgccacagaaaatgcggcactgtacaccacactacacataagcatcccacaatggcgaggaagcgcaatatttacaattttgttccttcccgtcacgccttggagggtacacggagtgaaggaaatacaagtaattttttcagtacttgaaaacgaaaagatcccgataaacggagcaggaaggacctagtaaatgctgttgagaatagtcccacattgaaagtttagggggagtggcaccaacttaaaaggggaggggtccctcacctcatgagctagcttttggggtgtagaaaggctttctcccggttgggccaacgtctcccggttttaggccaacaaatgctaccatagactttacttattaatctggcttcaatccaggcccttgcaaagctatctacatgaagccatccagatgattatttacaggtgatcatgtagtgtccagctactcgggtcgaacgcttatcaggttggggagcaccgtcgcctgcagcttcttcacctcacttgtcgtgaccctgcaggaatcaagcgacagcgagcgcaggttctgcagatccttcaggtggcggaggccggcattggatacacgagtgttggagacgttcagcgagactaaagcagttaagcctgcaaaccgggcaatcatgtcatattgtcatgtgataacagcacagatagacaacaatagagtgggcacatagggacgtcatatttgacacggaggaataataccagaaatcagctccagggttttgtctgtcaggttaacgttctgagaaagattgagttgcttcagagctttgagatccttgatattcttcactccagcatcagtaattaacccaccgcagacttcaagagattcaagattcttaaaaactgaaatagcatagatcatgttagctgatgtgccacgtgaacatataggattcagcagatgataatcaatctgatatttctgataatgctgctaaaatcatatgccactatgcttataagacacttatctatagatatgtctacttgacagggttcagagggagcaaaatacatttagtaccaagtgtattgcctagtaccaatttaccatggtacagatcagaccgataaatattggacgaaaaaaattgcaagctcattttgttgtagctaacattaataaatccattttgtattgacattgatgtagcattgtataatgtagttgactcttcgaggtacacaggtacaaccaagtaatcaacatagatactttctagatgattctaagctagccgaagaccaaattcagagagtcgtctcaataaaatggacgcaattatgcaatttagtataataattctaaaattgaaatagtttcagagtatgcccttacatctgaagcagcttgtgccatagtccgttatcctagcaccaaaaaggtccagatgagtcaacccagtgagacctgcattacctcccaaggatcaaaactaatataaagtgtcattgaaattaggatttgcaactactcgctgcatgttaatagatcaagttacatatgatcttgcaaaattacaccaaaacccccacgagatgcaaggtatcaaacataaataaaaaacaaggcatggaaaaattcagcaaatgccacacaaattcataatcagtgagatccaaaacaaagttgcgaagaaaaaaaaactgcagctagcagttagcgccaaccaatactgatcattattatattagtgcaattcgtacaaaagaagtatcatgcattaccaaagttgtagcatataatacatacttgtaagtgctgctaagccaacatcagtaatctgccgattgtcaagattaactgacttcagtgaattcagtgcagatatcttcttcataccggtatcagtaactaacgtaaacgagagattgatgctttccaaattccgaaggcctgtaaaagtttaatagctttccaatcaaatgcttcaaatgcccgtgcaacgacaaccaaatacagataataacaaaaataactgcagaggatttgtgatgtagcaggttgtgccagttaagcattataatcggattgagaaaactgtacaaaaatcgttgcacaacttgacaagttttctaagatgatcagacataacaaggatacgatgagagcatgtattaatcatttcacttttctgaacattcactggttgcaaacatattattcagtaactgttcacatgctagatactacaaatctacaatacatgcagtaaagagattaagaaaataaaatgataaaaacaatcacaagatgcacataaaactgtagcattaacacatttatgttttgccacttgccgaaaacacttcataaaagtaatcttgtacattattcatgccaaagatgcagaataagtcctattatccagtgttttacaacatgaatgacattgcatggcacttaactgctaaaaagggttagagctagaaatattattgttcataagtgaaaacagaccagatagatgctggagtccactgcttccaacttcggtgtcagatagctccaaacttttcaaaagcataaggcctacacataacataaggcatatatagtcacagtaaatagatcacaaatgcaccaacgagacaatgataataattaataatcagcaaaccaagtaatgctcttaaacaactgaatgtacaatacacagaaaagcagttataacaggtacaggctgacataaatactatagacacaaggaacaaagtgcggctgacaactgtatcgtactattgaaaatcacaagtaacaagaaaattaaactctaagctattggcttcaacatgttttgggagcaaaattgaaaaggtaagtttttttttttttttgaaaggtgaaaaggtaagagtgagcagataattctaacaaattatgtaagagtattgaaaaatgaaaatgattaaaaactagctcacctctcagatgtaataagccttcatctccaaccttgcatgagtccaagtttagagattccaaattgatcaactctagaagcagcaaatgttaccagttagctacccaataatagttgtgtgactttaaagtgatatttcagtttctatgtacacaacacaatgtaccacaaaataccatgctctatcttctttttctctccagtctatgataacattcttgagaaatatatataacatatcaatcagtataatgcctcttttattccaataatttggcattgaaagctcaaaccacaatcaatttgccaatttcaaaattgcatggttaatattacgaacttctaccagaaatgtcactgtttcatgataaatatcaccaagttcatttctccatccaaatatatttttaaaatccttacaggaaatattcactagtgcctactggctaacataatgaagccagatatattgcttaaacaacagagaaaaaattgactgcaccacttatatttcctgcataaacatccatattcttaaatgtaaataaagttctaacaagaacttagtcttacctttcagatgtgctaaacaatcatctgtgatattattgaaccccaagtttaaaaccttcaattttttaagacctgcaaagcagaactgttgtaatgaatagaagaacagatatgcagggcataaacttttcgagctggtgtcaaccaggtggaaacataatattaggtaattctgtcaacaattattttcactagagttcacgtcatcagttattacaactgccagtgtataacaatgacaaaaggttccatggataattatatcttgaacatacaaagctcacaaaacatccttccagcttttatgcaaacatcgttcaatgcccccatatttactactcacctgaatttacttaaaacatgtatgttggcattattccagtttgtcagcagttggcattacaattaccttgaaagttttcacagccttcaccgtatatgccacaccgactcaaattcaacaccaccagagaagccaatcctacaaaaggaaatgacacacaaggttgtgtttttatggtgttctctagatgcaatcaggtgctttgaaagaggtgaacactgccaccaattgtagtatcccaatacactattaagaaaagttgcaagacctgatatagcttccaaacaggcagcagtcactggacagccctccaaattcaactgtgttagcttggacaagcctagagaaaacaaatgacaaatagaaaacatgagaagctttagataaggtcagaggtaaacaattaaatggagatcatgagtacacccataaaacgcaaaacagaaggatgactctttcgtcttttggttgttcaaccattaaaaatgaaagatcaatgtcctaatcaagaatgattaaaattatgggcctgtttacctctaagataagaaacacccagatcagtgattctacaacaagccaattgcaattctttcaaatttgtgagatctgcgcaaaagaaaggtgcttgtcagcctggaaaggatgagataaagagtgatatatattccttatagtttaaaataacaatagctcaatttctataaaaagtggagcttaaaaagcaccttatacagttatactatgtcaagcaggaatatcaaaggaaataaatatgggatcccaataaatatatgtgctgttgttacctgataagtatttgatatctgaatctgcaatgttgttacaatatctcatattgagtgactccagattcctgaggcctgtaaaaggataaatgcagccaatataccaaactatcaatttctaggcagttgaagttgcaacctgacaggattatgacattcaggtagggaggggaggggtgaaagccaaaaggactacaaaaattcaatttagaattctacatacccacagtagtaagcatataaaatgtgatgtttaggagctgaggtaccttttaagtgaacaaggccaccatgaatctttaggcatcgttcgagatcaagatttaccaaattaactaaattagcaaatgcttccattgcttcagcagtaataccatcgctgctcttgaaactgagagatgtcaggtttgaaagacctggatatttaaaaggcatgaatatctagttcaacaggatagttaacatgacaaacagccaaaacattcaagaactatacaaggaagaaactaatctatctaataagcgatcaagtgggttaagtttctcaaataaggagtttaattatatactaacaatctgttccaaaaccatctctgttgtaatcatataatcttaaggcactgctaaaagatttaagctcatgcttaaagctctccaagatgacccaaattagtcctataagagcatgtctcagtaagtagcatgttactgacctgacaagattcctaggccatgctctgagatcatatcacagtaattacatgccaagctttgcatgtttggacaatctctaagaagatataacccactatcagttatttcagagcaagaaatgtcaactgataacaatgaatgcctttgagaagccactacttccatccaagcatcattcactccaggatactcccccaaatcaatgtcctgattgtcaaacgtatgcagtatttgttatcccacggagaaaaactcagccttatatagacaattatcagatgaccttcccaatacaaaagctaattatcaattacgcatgctgagaaaattcgacttccaaataaaggaagtgcaattaagagcctgctcttaaataaatatatagtttgatgaaactggttccatttgttactttcttgctaaagtataccagctcttcttttcttttttttggtgaggaataccagctcattgttattgtaacatcattcttttcttgaagtcttgtaagtactcatatgttacaagaccaaattatgtgtcatgcctgtaagcatgaacaatcttacctgtagtgcacaatcccgaaaagtttcaagcaatgtctccgtgagacggttcgacgctaccaattcattaaaaatctgctggctgagatccctcggcaatacagaaaaactagaatacttgttaatatcctgcaagtaccaggacgttaaacaaaaggcaagtgaaaatggcagcatccattggtgaaatcaaacacattagacaccaaagtacctcgcaggctttggccacacaaagctccattagagatgggcaacgaccagggccctttccctggcccttgcgggagacatcggaattgctgcgtggcagtgtaagcagcagccatttcaagctgctggtctttgagaacctggaagatgtctggaaagagtcatcctcgtgcactaattggcttctcttccttgagcagacagcacccattataagtgtggaagtattgaacaaaacaaatcacttcgtctatgaactccaaagaatctctatgttcagacacaattttgaccatgaatgcaacttgtaaccatctgtggcctagtcaaaatcctgggaaatcatcgaataacttccattccattctgccacatgaagataccatagtgttactgctggtggtttttttacaattagatgaatgctcttagataaagatcaactttatttaaactattttaatcatgcatcgtactatgtgttccccattcccaatgacaaaaaaaaatgtcatactaaaatagaaacacatcgaaaccatacaggcgtccggtttttgcgcgatcctatcaacagaacaaaatacacttaaggatcatcggttccattcagaacacgaacaccagaaccctcgctaagtaaagccacaaaaaataaaatccttaaaatccaaccgaattaacagaaaaacctcactcaatcgaaacgcaactggacccgagcgccgatcagaacggcgtcgtacaacctcaccgcaaggccaaattactcccccagaaagctagcggataaagttaaccccccgaaaaaatctccaaaatcgagtgaagaagcaacagtgcccaaactaatcccgcatcacccgcacacgcaacagaaaaaaaaatcccaaaacagctgcgcacggaattctcacccacaccaccccacaccggagctccgccaccgagccgccaccggcccaccgccaccaacccaaaccccaactctccgcccgggcagtggctagggtttagctagctccgcggggcggcttcactcccgcagctgcgaccgcgacggaggagattgatgagagagatcagccacctcctcacctcgccacgccactccaccagcgctcataaatatcccgacgagttctcgcggatggagagagagagagaaatagagaaaagcgaagggaggtaatgcgagtgggcggaaaactgttatagcgcggcgggccggggcgagctccacgcgtcccgcggctcgccgcgcgggcgtggccgctgccacgtgggggccaccgggggtgggtcccacgtgtaggaggaggagagcgggcgggcgggtaggggaatgggtcagtgggggcagaagtggggggggggggggggagggggtggtgaactggtgatagataaaggcgaaggggggcacgcaaacgcgagtgagcgaagggccgcgatcgtgtggccctcttggtattggtcttattctttttggcgtacacgtgggccccgtactgactatagtgatgatcggtacttctttttttttcagaagatctgttggatcgtgtagcgtcttatccgatcacacgttgtcatgttacgagacagagggagtaggattttaggatcgaattaaacacaatctaatataataaatttagataaaaatctaaataaggaagtctgtctaaattcgttgtattaaaattgataaattgataagaatctgagtcatctagattcgttgtttatgtgaggttgtggctaatttggttttagattgctatatattttaagaacgaatgagtaatcagttatgttgtgctacttatggtactgtgcagtatttcatccatcccaaaatatagtaattcattattggattgggtataacatagtattacaaatatgaatatatcttctgtttaaattcataatacaaattgcgtctaatttaatactaattatattattttagaatagaaaaggtagcattttataataaataaggattttgttcatgtaggtacatggaaaaaatcctttatattcaggtagtgatcattatcaacttatcgttgtcgctagctcgctccaggcgtttcgatcttctgaattgacgagagagtacgtaataatatagctcacctgttgggaggaaagaggggaaatgccatatcaatttcatttgaattatgttcggattttgccggaatcaagtcaaaggcagcctaatctcagtctgacgcaactttgggggagtattttaggtggctgcaccatcggaaaatttcaggtcaggacagcaacgagttctccagagagttgctgacgtgcttgctccctctaggagtcaacgacccaagcgtgcatatatgctacaagtagtataatacacagtagtagtaccgcacaaattttgacaatttaatcatttacaaaaaaaactatttttacaaatgaactgctgccaaaacttattttaaatctgacccttttgctcaacgctaactcgtgtggcgctgaatttagacacctcagcgtcaaatagcatggcgctgaatgtacgttgacacactgacttagtctctcatccaccgtggcacggcattcagcgccagctgacgtgacgtgacgctgaggtgtctaagttcagcgtcatatgatttgatgttgagtaaaagggtcagatttaaaataagttttggcagcagttcatttgtagaaatagtttttgcaaagggtctcaaaatttgtggaagtaccgtgtcgtgctattaataactcagttactttactgtctactctccattgacacaatctagtactactattaaacatttctctgatgctaccttcacaaatcacacacagccaaaaggagcgatctaacgctcgatcattttctgcaaagtgtagaaagcgatataattccaagcccagattagatgaacaaagtaatgcccttttgtcatcaaaggttgctctttaaccaagcatgtaatgatcttgtcaaacttttttttctcccaaattggaccatcagttgcaagtgaccctcattctcatggccgatccttttccctgtctctcacacatatgctttcgcttcactgtagtgcgcggcgcaaaagcaaacttttgagatgttttttttccctttgtgctgcattttcgtagcaattttttctggacggtgattagagatatgatgaaaaaacagtacttcccattattttaaagtacacgacttttaaatatacattgtgtttgaccatatatgccttatctaaaattgtatattgtcagtgatatggacccggtgtaccacgtacagagggagaaggctgccccaaacccacgtgcccccccgggggtcgggcctagggttggagcggcgactgcctaccatgccaggggtcgggctgccccgggcccccgaccccctccacgctctgtctcgcgcgtgtggcttgggcgggcactcccagcgcccacctacagcatttattgaggcagcactagcgcggcacgtcgcatttaatgcgatgtgtaggcgcactaactggccacttgtggccggaatgaccgatgtgatggcggtcagggagccctgcgcatgcacctgttgcttgaaggggacgtggcctgcggctgcccgtctaatcgccattaatgaggggatttttgccttgcatttgagctcggaccggttcttcttacaccggtccgtatgagagatccccacccaacggtgggaacggacgaccagaagtcatcgataattaagaatgaatgacacaggcgtctgcccgtgacgctcggcgtgatgggatgggcccatgcagcggtaaggcgcgcgtggctccacacgtcggaagacaagacaagcattaattgcctgtaaagaatgttttccttacccttgaagctaggtcttgagcctttatggtaatcccttaagatataaaagtaggttcataccctaatggagacggggacgaatcctagagaagaaaagcacttgtattctcccacctaaatcaaccacacatatgagtagggtattacgttttcatagcagtccgatcctatataaacatcttacatctccatcactcccgaggggcccgaccccctctgcctctccccatcaactctgagacctttacccgtgcccctagaccgaaccagaaagggatctccacggtcccttgcttgagaagttcaccctcagacatatataaatatgaaaaacagaaataacgcttaaagtattttatgttaaaataaatactaaaaatatttatataatttctaatataataaatagtgaaaaatatgtcttaaaattaaattgttttaaagttaatgacattatgtattaaaaatctaaagagtgccgagtggaataaagatgatgtgtggtggtggtgggttttatgtagacgatgctggttgtgggcccggcggctattgttctgtagtacctgtgacgatgcttaaagtctcgcgtaatctatctgcctataatggaacgtgtcactagcgaaatcatcagtatcctaatcgccctgtagctaagccatcgctcgtgtcctttcttcaccaaccttctttgctcgagattcgggacacgtcatcgtgactcagtttgagtaaacctctgtttatttatttgtaaattttttgacacgtctaggtcaggcatttcgatttggcacgtcttgtgaaaacgtgcgacgggaagagacaagttacgcatttttcatctcatcccccatggccacttgtgttctttcttttcttctttttttcccttttttcgtttttcgagaggacactgacactgacccgaggctctcgcccaaacctgggccgtgattgggccgaaagattgccttcgatggcgtgttgctaattaggcccaactacttgcaaattaatcgaatattggcctagccagcaagtgcaaatttcacgtttttacgacagtgcaaatattggaattggatgacagttactaacaagcccgtcaactttcaatttatcaagaagacaataacgtgtgtagccttgatttttcttctcaagatattcatgttaagacttttatttcgaaatttggatgaccgattcaggtttcagaccatgtgcataaacaaaggaaagtgtgcactaatgtgactatgtgagcaccatcatagcactgagaaagctagacaccggtacagaagacatgccagtaaaagaacaggcagacacgcctatggaaactggaatacttttctcatgttgcacctttccagaagtttgaacaaaaaaaaaatcccaatgcttttagaaataaccaagcaattggtgatatcaaccatttcgatagctttcccacttgcacctgaatacctggtagttccatcggattatcttgattattacaacttattccatgcggaaacccccttaacgctctttgatctatcaagccgacggcgctaccagttcaaaatacaagcaagaaaagccaaaccaaatggcgaggacaaaaagggtatcacgttggattgctcagcagctggtaaatacggccaggcaaaatgtgatacgtcgaattgatgcacaaaatggacaccggtgttgcggtgctgcatcttctgaattaggttggattgaaccagctacccatggaaccattcatgtggccatttccatggatgcctgcaccattaggtgctacggacgatgtggggatcagcgaggacggcagaccaactgccattgaaggaggcgaggagtataaacctgggacgtgcgggagcgaaggggcactcaagcgatgactgctacctttcctttgccgaattgcatgtatctgtcttaaaccccgctcgtggatgtttgtgagtgtctcaagctcatccagtgataaagcttccacgccgacaccatacacgggagcatgccgtgccatctcttcctgaattgaggtctccagggtgtgaatatattgctgcaataggaagatatgtgtcagaaatcaaatatagtgtgaaaaggtctggggaagttattaaagaagaaaaaagtgaattgtgacaaatacggtgagctttttcatcattacgatttacaaataccactgaacattccaaaatcatttaatcatttaagagcagaaatataaaaaactgaatgcaaacatgccttaaatgcgtgcaattgcacgtttaatgttacgcaggccacaatttatcagttgactgttggttcaacgccgtacaatctactacataaactgtagaatgacctactttcaacatttttgcatgctctttacagaatgttgaatttaggccaatcgttcccaatataaagtggaaatgtagttgttaaaacattccaaactggtacccaaaaaaaagtggagcacccaaatttgatccatggttaaaactaagataaactataattagacattaaggctattacttagttgctgttctccaaattactttattttaatgactaattttaataagtggaaaacaactctgcgccataaggagttttctactagaaagataaagggtgtctttggtattgaaaaataattctataattaatattaggactactagttattttggcaacgtaaaaagttagcaaggtggaagacctggcaaacttgtagttttgactccattccatctatgtaagcttcacaacgagtaatttggtcttctttttctttcttttctccctcggtttgtccaactgtctgagtcagccttcttacttcaccttcaagtgatttccgaatctcttcacgagtctgtgcttcagcaacaaaccgtttgaattcatcatcaacccttttccttgaagcttcaacacccttaagcctctctgccaaagcattcttctccttggttattttctgtagcatgcaaaaacataagttttgatgggaaaacattgatgtagttgatgtcactaaaactttcagtagtaacatgtaaggtaatgataacacaaaaaaaaaaagccaaaatggcttgctccatatgattttcatatccaaaaaacatgcacttgcaatttatcatgcatgaataatcctgcacgtggtgtagtggtatcggttgctcctcaaggcatgctggaatcacattcttatgatactatgtgctagtttcaaactttgacatgaaatgtgtggtgctgcagtggccatgaaagaattgttaaaaatcaatgtatggatcttgattcgtggcaactacagatcgcaggtaggaagtaccagaagtaaaggtgtggatccacaacttctgaaaagagcatgccaaattaaccagaaagtgtattcgcataatatagagaaccaaggtctaggtgcacaggcatgttgagaataacgagtaacatatatctataatagtatcgaagtgcagaacaaaagatgggattcagtatggataagacagactttgtaaagagttagcatcatttcaaggtactccattcgttccatattgcaaatcattttagttttgtcctaagtcaaactttgtcagagtttataaaaaaatgcaccaacatttacaacatcaaattagtttcattaaatccaccatgaaatatgtcttgatagtgcacttatttgttattgcagatgttggtacattttcctatgaactcggtcaaaattagagaagtttgacttaggaaaaaacgtgtagatgacttgcaatatggaacagagagagcatctaacaacagaaatgaacactagaacttcagaagtggacagttcattttggtcgcgaacaagtattgcatgctgtctttatggtagttcactctaacctttagttcctcgcgtttccatgctttgaactgggatagttgtgtctctgcttcatgtagacgatcatgaagatttttcttatcagcagttagctttacaatttgctcatctttttctgatcgtacccattccaactgattctccatctccagcatctgctcagaaagttccttcttctcccggacaaaacgatccttctcagcttttagctcagactacaataacaagaaaattagaagaaaaaggttaggctagaaatagacaacaatagtccggccaaacagctgaatgacaaggaaatacccttagatgcgcattagctgcctctgactcagttagttgttgcattaacacatctttttccttagtgaattttgtttgttccatatccatgtcttctcgcaaacgcatattctcatcttcagtagcacatatttggtgccaaagatttgcacgatcagcttgagcaacttcagcaacctcacgcaacatgttcaaaacaggtctagcaattccaaattcctccttaacaagaaataccaagacatccatatctatgtcaactgctcggcagctatctgaagtatttgttgctcgttcaacaagacccttcagaattctatatctataatgatcctcggtatatatcttaaaaatgatagcataaagcatccgcacaaaatcttgcaccctggtttctgtagatagagataatacctcaccaagtgcaaggactgaagtgaaatcatcttcttggacaggcaaatgttcaaactgcccgtctaacagaacttgcttgttctgtgaatcattcaccatagtcccagtcccagacttaagacttaacctgtgagaatgccttctttccaacaccatggctactaattgcagcccaaaggctcctcgcaataaagccctctgcaaaacctgagaaacttcaacaaataatctgggtatcgacagcatttctatcagtataaaaacatctgatagatgatcttttccatgtacagcttgaccttgcaaagaatgcatcccttcagctgaaaactcgtctgtactactagtactacaggacatagagaggcaactgctatcaggctcacagtcagaatcaatatccttcaacaaagcatcagctacatctgaccagctatgcactgttttagacaagaaatcaagcacacacaggggaacttcagtacccagatcttttagtctccatcggacagctctagcctatggagaacaagaaaggcacactaataagaaaagcgagaagataatttttaaaaaataggaaagtaacataatcttggatggtaaacatacagcttgagcaatatgctggcattgtgatgctgccttgagaacatatgtaatggcctctacaagtggctcatcatttgaatcagccaacaattcgagtgcatgaaaagatgcttgtttccagatatcacaatcaaattctagctcagatagagcattaaaaacctgtgatgttaaagacaaagaactacattaggtatcagagttcacgtgcatgtttaatcatttactggcctactatataagctaaccttagatactgatacactgtagtcacaatatagaaacacaaatgtagaaatgtgtagccattagttaataaaaacaatgtaaatacatttttttttcacatagtgacaaataggaaatcttaccggtaacctcaacgaaggctcagtatctggcttttgaagatgatctaacagtgcacaagcggcaagagagtgttctgaactatcaaccaactttgggacaagggcaaccaaatctggctgaagcttctttggagatttctctagtacaagtgcaattttctggacagactgaggtcgtcttcttggttcagggcacccatgtgggacagcactgtccagtgccctcaatgaactaactattagtcctaacagctcctctgattgctctggccattttgtctgaaaaaaaaaatccagcagagcaacttattattgttatcaaagaagaaagataaaaaagaagctgaccataataggaaactttaagtcataccctggaagcctggtcagagccttcatcttctagcaaatcagcaccagatacttcagggggagaacaggactgttctaaaactctggcaggaatatcatttgtacacttatctgtgttttgtacagaaagcctatgatggatatcatcattgccaggtttcagcctttcatacttattactgaaagcacattctgtcagttcaccttcaacattgagctctggtggagagctagccccattcgagtcaggagaagttttggaacttgctgaggatgagacatatgctggtctttcttctgaaggttggcagcactcaaccattatatcaagaagcaagtctatgatagcctgcttcaagacactaactcccatcagcaaactgatgaggcttgtggaactcgagtcgcactttgaaacatctttctttccaccagccctggtggatactttggtaggaagtagcatgcgctttacttttgctgggttatcgaggtaaacacgcagaccagtaagaaatccagcaattgcactagcatctgttagaattttctctcttaaagtaacctgcggctgagtatagttttcaccatatgtaagagaaaacccagctctcgagaggaggtttcggaacatatcttcctcatcaccactcatatcctcgctgtcttcagactcaataaagtcatcaggatctgttgacaaatcatcctggtcgtcatctgacgccaaaacctgcaattgtgtgactactataagagatgcagagagcttttctaccaggcatgaacagcaacagttatccaagtacaatactacagtataggaaaagactagaaggccataatgttatgctaccacccgaatacaggaaaacgaatagaagaacacctggactgctactcatgcttatgtccttaaatctagtgaatattgactaaggctgagttctttccccaactttcccaactcggctcccttgtgttccgcgcgcacgcttttcaaactactaaacggtgtgtgttttgcaaaaagtttctatacgaaagttgcttaaaaaaatcatattgatccatttttgaaaaaaaaagttagctaatacttaattaatcacgtgctaatggtccgctccgttttccgtgcgcagcaaatgggttcccaacccaaacaaacgagcacagcctaatagtgcccagaacctggcatcttcttaaggactttgaaattgacatgtcagtaatgccaccagactttgaaatccattggcatggaatactgtcgtgctttagtcctgttgtctacaatggatttgaagaaatcatttttttgatttcctaggatttttgggtagttcaatgaagaatgtacatataaatggaaaatggacacaatattcgatctgaccagtgttgcaatttatttttttctgtaaaaatgcttaaaagaacatttcacctatgcacctttgtagttgtgtgttgttccaactaaatagatacacctaattatcaaatgatatagcactagttcttcacagaagtttaaattatagcctatgtctatatatgattcccgtcacaaaaaattgagcactatagttgttacatgttgtcaacttccattattaatctcttatcataatgtatccactaaattaaaaatatatatatgcagcttgtgcaatccctgttatttactaatctcagctatactatacaaaaaaggtgtgttagcatttctaagacttgtgtcactatactcccaaacattccaaaagcaaactaatccaatatgacccaaatcaccaaaaaatatgagtatcctaggctttttcaacttattattcttttgatctctgtcatatgttatatcaaatgtcaagctgcataatcacattcgatatgaacaattggattttactgtactgcaacaacatttggttagaagcatgcatgctatacaacacgaaggcaatttggatgtatttggagtaactataatagtatcatgactatcatcaatatttaccccaacccagcacaggaagcaaaaaggaacaagccacatgaaaaacagcaaatccaatctcacctcaagatcagagaaatcaaaccatggacagcagtctatgatttcacaaacaaaaacaacagtgtcccggacaagaaaaccagcatcagtgtccaacaggtctgagaccttcatgaactgaagaactgaattgttccatgtttttgtgcagattgatgattccttacacaccgtttttgcagaattcttctggttaattatagccatcttatagtgtacccaaaagttcttatcaggatcaaacccagatggctggtcactttccaggtatatgcagatcgtatcaaacgactcatatacacctgcaaattgtgataagatgagcacaaaaggcaagaaatgtatggcacaagacatgaaaagtaacttcctttacctatacgcaactcacaaccaccagcctggaaatatttactaaaaatctttcttgtctccataatatccttgaaggataagaaattttccaccttccacgtgaatgatggacgttttggcaaagaatcaatctgacatccagaacctgaactgcatgcttcagaatcttcgtcactaagctcttgaatagtagcagtttccttcagaatgagaacctctgcagcaaaaacaacagtgtcctgtacaagaaaaccggcatcctgatcgaataggacagttaatgtcacaaattcacgccatccccaatcctttgctgacttagagtaacggttctgagattctttcactattgtcctctcctctaatttctgattgatgacagacaatctatggctcacaaagcagctccattcactgctattccggggatctgtcacttctaaaaacactgacaggttgcatggcggttgagactgccctgattacagaaatgttaagagaaccaactgacagaatgagtattcgcattcttaaagtatacagttacataactataagtaaaccatactcaacagctacttgataggaaagtgacaacgattagattgcaatgaagccatacgttcgcagagaactcaataaataggacaaaaaattgtggcatctgcagtttttagaagatgtcgagcctgcttaataaaacaagtgtacttaacaaaaattgaggcatctatagtttttaaaagatgagttcaaatgaccatatgctgcatctaagagaggagaattggcacgatttatgcaacaaaccaattcatttgtatcatttaattaataaacaggatttgatcatatattaaaacgaaaaatgtgaaacccaagctgcttaatttatttagtggcatactagccagtagctaaactagtttttttttaatcttttgggatttacctcatttccatttccaggttccaatttacacaggccacttaaccttgattccaaaattttcaaacagttaaaagcaccccacacatttagctatgttatagttctgattaaatcaatcaggtgtgtgatgtgtgtgcctgggtatgttaccaaagtttagcctctataagcagtatatgtacttatgtagcagaaatccacaagttgatcttgcaaactaccagatgagtatggagaaaacatttgctagaatgcttaccccgtggatacacaataaggcggcagtctcgattcccgacctgaaactttctgcttttgatgcacagacccgtgatctttcgcttcttgagcagctccttcaatcttgtgaagttctcaatcctccacacaaactttccaaagtgtccatccgactttctagccccagctcgtccactgccagcaccactcatgcctgctatcatcggtaagctgcgagtgaacgagtttgactccttgatcacatgcactgaagcactaaacaccacagcaccatcaagcaggtaacccccatccgcagccaaaaaatcatccatttttatgtaatctccccacccaaggctggcattgtcagccccaaaccggccatacgagtctttgtggatgtgactcccacctggcttctgattgaggatcgaaacacgaaaaagacaccagcacccacggtcaccatcgggcacgccgctgcccccggcactcgacggcaatgctgatgccgaggaccctgatgttgcctgcaccaggggctccttgctctccagacacaccgacaaatggtccgcgccagatacattactctgatagacactaatccggagcccgcagtcgctcccaccggcattggccgccgggaagaaggcagggctcatgatcttctgcgtgcggaccatctcccggaaggtgccgaagttgagcaccttccaggtgaagcggctgtcggcctcggcgaacgaggcggcctcggcgagcaccgatatgtcggcggcgatgacgagggagtcgtgcggcgggaagaggtaggcggcggcggcggacggcgcgaagtcgcaccagccgtgcgaccgcttcttggaggagaagcggtgccacgagtcgcgcgccagggacttggagggatcgggggaagggtgggcgacggagaggcggtagctgaggaagcactcccatttggaggaggaggaggtggtggtggcggacgacgacgacgtcggggttttggggtcgagcacctggaggtagagggagaggtagcccgggagcgcctgcgagtcgccgcgcgggtagaggaggaggcggcagtcgaagccgcccacctcgaagtagcggctgtagaaggtgcgggcgcgggtgcgggggaagtccgggagcgtccaccggcacgacgcggaggcgtcgccgcgccgctcgacggagaacgtggccgacggggagtccgacgccgacggggaagggtcgtcggccgccgccgccgccgccgcggcggcgggaggggagggagtggtgggcttcatggaggattggggatttttttttttgctcctctcctctctctgattgtttttttgggatgcttttctctcttttttttttctggggggtgatggtttgggttttccttggtcctgcggcaggcaggaagccaggaacagaggctttgatgaggtgatgaggctgctgctgatgctttccaaccagtgatgctaaaatacatggttttgtttaaggttgctttacatattatacggtttgtaaggtttattaggatatatttccagtcagtgatagatacttagatataaattaattaatatacataaactaatagttttttttacctataaactataatagttttgattggatgtatttgtaatttttgccctgggagaaaagtatgagttatcacgagattggtgctatctcaaacattaaatccttaagccactagtgatgtattcttacttgttcaaagttactttatggtctatagtattttattaaggtaaatctaaacatagatggtaataataaatggtgcttgcatgcaatttaattaatttgcgtaaatctgcaaaatttaagtgaatgacatacatgatcctattgtgttaagaaaatagttttacttgtcttggattgataccagttggtatgtttggctaagctagctaagaaaatggaagtttttttcgaatgcttttctcttttttttatgggaaagccggaaacagggtgaggtatgatattttccaagcattgatgatagtttctggtttgctctaagttgttttatagactatagtttaaatgtttattaaggttgcttattaaggtaattcaagcatgcaatgtaacaatgataagtactaagttgtaagttaattaatatatagaaaactacatgttttgattggatacataaggattttttccgctgaaaaaagttacatatgctaggtcgtcacaaggttggtgctagctcaaacattaaaaccttaagccattagtgatgttgtctcgattgttcaaagtcgctttatgatttacaatattttatttttaagataaaaccaaacatagatagcaacaataattacctctacttagttgtaagctattgatgtgcacaaagctaagctatgagttttgagtgaatggcatatatgatgttagaaaaaatgttgggggttgacccgtgcgtatatttgtatatggttacatcaacgaagaagtgcaatacaattgtcgcaacatctaagaaagaaggttgaaagttggtgctagctgtatttctagtaatacgttcctaaaatatatcccctgtattttcttataggtctttatatgggttattgctaaaaaaagcatcatatccccttaaatctcaatccctacaaataagcaaagataaaatctctattttccaaaggaagaaaacaaattttagtgcattacaaatagaaacaaatcatcgctaccagctacaagtgacgataaaggctaccgctgtgtcctgctcggctgctcgggaagcggtgggatagaggactagcgggacacttggggtcttggggacgaggctgcaatgccacgccctacatctactcatcgacgagaagcctgatcgagttgagccggggaagccacgtcatccctgccgctattggcagagctacgtcggcgtaggatggagggccgctcggctggagatgctcttaatgacattaaaaacttaaacttatatgtgtaatgtatagatggaaatagttaaattctatgtttgtcttttcggtgtttaggtgtatatgtttcaattgtgatcataattgttgtgcaccgaaaattagcaacccatttgtttttaaaagtaatttatttttgtaagaatcatgtactaatttaactttgcttcaagaaaatggtcatatccgataaaactcattctggctaccacatgttttatcggtttatagtagtgtcatagttatagataccacatacctaatagtagtcgactaagctcggcaggacccaccacataccatgtattatacggaatcatacctcgtgtatagaaggagttccggataaggaaggacaaatatagttctatatggaaacggcaagtacggtctccctagttctacatagacagggggaatctatgggtataaatacaagctctcctatgatgtcacgcactgaagttcccctttccagctttaaaatttgttaaataaatcgcctaaagaaattgttgaattaacctagagctaatcctcaattaataaatgcatttaataatcaaattcggcgtggtggaatttttcttgagttccccatgctccaatacattaacaagacttttagtgcaattttcagagctctcgaaataattttaaccaattaaaattgagcacatgcaatttttaaatcccagggaaaatcttttcctccttttctttttcttttccctccttttcctcttcttgggccgtcggcccagtccaccccaccgccacgcgcaccctcctccttgtgggccggcccaagccgcccctccatctctcctcgggacgccgacaggtgggccccacctgtcggggtcgtccccttcctctggccgcctgccccacgtcggcaaccaccgccgaaaccgccgtgcccacctccgccgctcctcccgcacccacgccgcatcgcccacgcgtcctccccacgtcgccgccctctccccgcgtctcccggcacatgcgtgcgctcgaaaaggggcgggattcgcattttgaatccccccatctcctctctctcctccccacgtcgccggcgaaatcggaggtcctcccggccacgtctgcctccccctccgcctataaaacgttctccgtgccctcctcttcccctttccgctctcgccgctccctcccgtgaatcctaccgagctcgcgccgctcgccgcccgcgccgcagctcgccgccgcctccagctacgcgctgccgccgctagagccgccaccgcgccaagccgccgccgccgttagcttcgccgccgcttggagcacctcggtcaccgcctcacatcgcccgaacccctcgggagctccggtttcctcgcacgtcggtgagcccctccattcccttcaactctggccggccatttttgtcgccgcgggtttcctctaaacccctaacccctctcctccccctccttaggtgccgccgccgcccgtccgcccctcctcgtcgccaggtcgtcgccgccaccttcacccccgctccggtcgccgccctccggtgaggagcccctctcctccctccttcccacttttccccgcgcgccgccgctctccgcgcactcgctatcaccttcggccgccgccgtcggcctgtgcgccatccgccgccgctcgcgccgccgcttgccgtcgccggtggtcgcgtgcgccgccgccgcacccccatggccggtcggccggctttgtgccgagccgagccgtgccaggccgccacccgcaccgtccgatcggccccgggccgtcggtcccgtggaccggcggtggatcacccacgtggtcccggtccacggtggacaggccccttgagccgctgccgagtggggcccgcatgtcggcgccccctcccttgatgacgtcagccctggggatttattgcgcagtaattaattaaggccttttctttattagtaaaaacacagagaatcttttaaaaatcataactaattcatccgagctccgattaagtccattcaagtctcagtaaattcataaaaatgcatagaatccattaaaaatggttttgtttcctgtttcaatagtcttatagcctgttttgcttgtgtgctttgtttgtcgcgtagatttcggccgtttcatcgatccgcggtttctcgaagacgttgctgtggttccatcagtgcgagagcaaggcaagtcatgcattacaattgatcatattgtacccaatttacaaatgtcccgcatttctattaaatattgcattgttttacaatatcatgtgggatgagtcctactactcagccatatattgtttaccttatgccattgctaactcgggtattaaaatgactagatgttggtttaggaaatgcttagccatgcttagttctactagtacacaaaaagggaatcacattaaagcatagactttgattattggcatagctttggtttagtgccaccgtaatggtgttggttaattaaaatacactacatggtgggctgtgggtgcatggttttgttagtcatgcccatagcgattaaggaccggttcgcgggataccctggaagaacttaccgtacttaccacaagccagcgtgggcaacggctgggcttgtagtgtagctttcctctagccgacgtacccagacgagggtgggcgtgatggagttggttcagccggggtgtccggttgatcggcttccggattcaccacggcatgaaaggggggctgcccgttgcctgctggggacgggggcgaaccctaaggtgtggtgcgatcggttagagggggttatgcgaagggtcctgtcacggcctctttccggtatgtcgtggtggcatgtcggtgcatgggaatgtgtcgtggggctgtgtcttgtgggtacagttgtacacctctgatcagagtaaaactattcgaatagccgtgcccgcagttatgggcggtcgaccagattcaccgtgattagtctcacatctagttagctaatggaactggttagttcaggtggtggtttgggcctgttgcaacgtggtgtagcgttggacagtgattggttaatattgataaatcactacagctgttttactgctttcaactactgcttttaaatgctagctttatgcaaatgagcctttagcctcctttggatatatcctgcatcatacctcctcttccggtataacttgctgagtacagtgggtagtactcagtcttgctctctttcccccacaccagagctgaagatcttcctagtgggagttgttttgtcgaagttggtttcgtcgctgccgtcaaggattgcctgtggagtggagtcgccccgctgcagaagtcaagtttccaagtctagcttgttttatcttttccgctgcatttgtaatcttttatatttttgtaagacgtggatctgtatgtcaacaattgtcgtttgtgtaccctggctggtcctggataggggtttaatacacattcagcttagaaattctggttcgtgaatttctgggcgtgacatatgaggagagggataagccagaagccaacacacaccgctagatccatcagagattagcctagacatcccccatccggtgcctatggaggccagcaagagggatctagcaccatctctgatctcgatgagttcatattcgaggaggaagactaccccgtcatcgactacgagttggttatccatgctgccaagtcgacgacagctagataggttattccaaatattgtacttgtgtgatctagatgaataaagagcaacaccggctttggccaacaagatttagggctattatttgacaggtaaggagcccgaatctgtataaaaatccttgtccccatctcttttacctcaatctcgcatataacctggtaccgaggatccccatacatacaaataccgtagtcgcgacctcaaacgtcgacaagttgtgtgtctcatataacacctaaatcggcagcaggttgacaaatctttaagtgacatagcaatcataaacaaattgaaacttaaaaaatatataaatattcaagttaacttgtcataaacattttcaaacacaaaaataaaaatatatcagctccatcatttacccgttggcttatcagccacaggtcacatgcaaaatttaattttctggaagttaattttagaaatgattttaggattttctttgttgtagtttagttttcaacatgggcttttcaattgctaagaatacatctatgaaagttttatctataagttatatttggttgcttcattcatttttccatggtttatcaaccgttgagcaaacaatgagaggctatatatttcatatcgaatttccttccaaaaaggctcctatgtaaatatattacacaattaattttttttatgtctttgttgtgcaactttgagtagtattgctatattaaaacataacaataatagctaacaaaatcataatattatgaataaataaaaaaaatcaacattaaaatatttttatgtttttcaaatgagagttattgtatcaaaacttcaaaattctaattgaataaatttagtactttcatgggttttaatgtttaagagcgttggtttcaagtaaaaaaatgaaaattgaagtagagtaggaccaaaacaccccctcatcttcgctgttctcacaagctctcgcgtaacggttttaccttatctcctcctcctctcatcggagttgtgtgttactccccatctacgtcgtagacatggctggcttcatccccgccaaaagcctttgtcacgcacacaacctaccttatattttttttatagattttctctatttttatggtttttcacttaactgcctatctactgtggtgcgacagttttagtaaaagttaaatcttatgctgtaagtccatatcttacacattaaattacatacacttataatatattttaaatgcactattcacgttttataggagaaaaaggggaaaatgatttattatctatttagtatgagaaaaaaatatcagtcaagattagcatatatgtaaaaaataaaaaaaacaatatgaaagaattagggaaataccaatatagctatatacatactgataagagatagatagtcatcatatatcatgcagtgagaaaagaataccacaatcgaatgctttattattgagcaaaattgatggtattatttttatcttttttagttgaatctatctaaccataattaatcagccaatgttggtagaaatccgtatcgtcacgcatcaacatatcatgagattattagtaaaagctaagtacaccgatccaaccatgcttagcatatcacaagactaatagacaactcatctttaatcgtggtagagaataaaagagtaaattaaagtttgtactatgtattcttcaaagttttcattttatatcattctttaacaattcttttcatttacataacagctaactttacatttcaatttggaccaccccataatatccatctccaagttcagtgactcttcactctgcaaccactccgcacactaactctctctctctcttctttttccatccgatagttagggaaatgccagatccaaaaaggagtagcccggatctagtatgtccgctttccgtcgggtcggttcctacctccctgagtccctgcaagcctagcacccccgacctcaacgacgaccataacaatagtgtgcatgacgatacagaaggtgcaaagacatgtcggaaattagagggtgtgggtgcgcatgcaaagatggagaggaggaacgatggtggctcatggagaaagagcggcggtggcggtgcgtggagcggcaattagtgactactaatgttctaaaaagtttatcaccgacacaatccctaacctagattgttgcattttttttctctaagtattactatacaccggtcatcataaaaaaaagggaattgctaactggtcgcctgctgatttatttttgtttgtcagccctttcttggcctattggattttgttcaagattcgtgcacccaactactgttcatgcatcccggcccagataacacagcccccgcgccgcatgtcacgtcacgtggtcaagcattgtttcaagcaaggaatccggtggcattttttgttgtccacgcatctgagaaaggagaggcagaagcagcgtcatcgacgacgacgccatagctccaacgcagctccactgcgaagtatgtcccccggtcgatggctctgcaagcttcggaccacgagggaggtgagttcccccaatggtcctctgctggagtttgggttatcatcagcgtcggagaagaagaggaggtcgccggagttagaaaagaagcacctagagtacgaattacgaagcatatccggagatccaggatccgcaagatttaggtatgcatttttttcgtcagaagctttatcagttcaaaaaaaaaaaaactagtactagctccttttagagtatcttcaccttccttggcgtaaaagaaaatctgtctcgtctcctccgctccttgcgccatctcgcggctgaacaggggaggggcgccgatttctccatctggcgagcagagcagggggaggggaggggatcctggtgagcatccacatcctcttcctgattcatctctctcccgccgcgactacttttgtctggaatttgctttcgttcgttaaccctagcttctcttcagagccttaacctttgtttgttcccccaaaagtttgggggttcaactgaaccccccatgtcccaagttggatccggcccctggaggaaggtggatgttagattgtagggtttcttacctccttttgtcgaactagatgcattgttgtttgctgtagaatggacccatgagatcagtgtggaagagtggccagtcctcgttctagataaatccggcaaccgaaagcgcgcatcacatatttggagtcatcttttctactagggttatcaataataacctcaggcgcttttgcggaacaggaattgtgccatgtttgttgttggggacagattttcagtcaacccccatgttagatcagggcaaagctgtaccttcttctctactgttgctcggagccctgttccctctaaaccaaaatgccaaatgcttttaagtggatagaacttattttttagaattcttagcggggaggtcagaggtcgtagttttaatcggaataactatgctctgtcatcttttgtgttcgtgctatgctgtgcgatacttaaaccattttaccattcttaggtcttagctattagggtggccattggtgaagcctggtatcctgtttcatgcttatgaaaatctatgaaatcatgtattgttaatgtttcataccttgtgggtgcacaattcaaactgttttgagagttgagaccaataaattcaatcttactagcagagatggcgagcacagcatgctttgtgattgtgagtaaaaatgatattccaatctacgaggctgaagttgggtctgctcccaaggtatggttctttcagtacatcccctgtagtaattagttctatgttcaatatggatacatcatagtatttttatcttactgtattacaatgtgctttattgatgtaacatattccaagcgtcaatgcactgacatcatgctttgttgtgtagtttctttccactatccatttctcttcatggaaaatgcatctgatgtcatatttaacaacatatgaccaacaatgtatacatatatgtatataccactatacatcaatgttttggtacattttattattctgcaaacttatttttaccccttagcatatgaaatgtcaactgctagtgatagttcaatttcatatcttgcttgtttgaacttcaaaccctatgttgaaatttctttcacaatatttttcttaaggaactgaggctgcatacatcacttgccttgtgttctatatgagacatgcctcccttgcatttgctcttccttcttctagatagtcctactcagggaaacaaatctcagccttgttttcttgtattccttgtccagaattaatttttgaaagagtaacttgcactcgtggtgcatgaatttgcgaggtgggtgccattcagtgcaacgattgcaaaatgctcaaactgattcaacaacttgtctggtgcatgtcaaccagggccagcacagtccacagttagagcattaaagtgttggttggggtgccaactgggcaaagggtgcggtaattagacaatgtggcatcccagttagcgacttagcgttcaaccttctatttaggtcctgataatgaaaaatcaccattgaagtgcatcatggagcaactcagggatctaagtaagaaaggctccttttattttatgaaaaaaaaaccatcccaattcatccctcccagggtggctcatgttttgccactctgttatctagcatcctaatcagtgcaaaaatactcttattagccaaagtactccgctctcaagtttatgcgccaaagcacaattcactatcttgaaatatccattctatgttcatctatggctatatatttcaaatgtctacattatctccaccatctttcatagctcagacgatagtaattcatattttgtacttagtacacaagttctaaaatccaaaggccttttatctagctaggatttatttccttgcacctattgtctgaaagttttcttactttactgtaaccttcaatttacttcctcctgcagagagaagatcaagcttatcagcaccagttcatattgcacgctgcattagatgttgttcaggaccttgcatgggctacaaacacaatgtgagtagccgttgatctgtcactattctgtttgctgcaaccaaagatatcgtcttgtttctcctgtaactcttgtttctcctggcttcacacaacacgttcatgatattctgcattccttttcaggtttctgaagtcagtagacagatttgatgatcttgtggtgtctgtttatgtaactgctggtcatatccttttaaaattaagatatggacatagtgaatcaatactgggaatagaagaatatagaaatctgagaacttggataatgataattctaccagcactattttaataagaatcctgccaggaaatgattaaatgtgtgccgcaacagggatttttttgtttctcacgcctgtttttattccctatgatgatcataaccattagccatgctatctttctagccattcctccatcatctaagtattgttttttttttggtggggaagtattgttatttcttaacttccagtctgatacatactagatttatgttacttcatgactcaaggagcgaggatggaataaaaagtttcttccaggaggttcacgaactctacatcaaggtaacatgtttgttagttgtatgcaatgcaaaataacatgatttactagatgctatagtgagtcaacattcaaatgcaaactcacaaaaacttatccttctttcttatattcccttcatatattatctattttgcagttggacaaataaccttgaaagtttctgcaccttattttatttctttatagataaaatccaataccttatttaagcaatagaaaaacaaaccttcagatttgctcttgacatctggaattgaactaaaatcttctggtggtatatacccaactacaacctttagacgctctgtttccatattatgtcattttgtgtttgtcctaaatcaattttttttttcaaattttaccaagtttatagaaaaacttagcaacagctataacatcaaattaatttaattaaatccaccatttaatatatttttatagtacagcatttgttttgtgctgaaaatccagctacatttttctataaacttgatcgaacttgaagaaagttaacttaggaccaatgttttaaaaagcggctgcacggactgcttatgcgcctgtataagcgtaacaggtcgtcagaccttgctgactattgctgtctggtgcatttataagggcaaccacaatgtgcatgaaaactaaccttaaggaataaagtagtaatttttgttgtacctttgtacattgggagatgagctagggagagaatagtgctatgtgcaaccttaagcttaaggctagccataagaattaaaaaaatatatcatggctttgcaacatgcatgcacactttcaatcttgagtaaatatgtgtctttttactcaatgggtcccaccttaaggtcaagaagctaccatatacattgtagcatgtactatagataaaacaatataagaatgtgggtcccatcttatggctcaattgatctaaaacattgaggatgccctaaggtttacaaggttaagcgggccgcatattcagatatgcggcccgcttaccgtgtaggcaattggccttagggcttatgtacccttttgtgttctgccatagttccattagtatttgctgtttgctctatcctatatggactacgatggtgtggtcagaagattggaacctataatatatataatgtatgaatcacaacttatttattgtttactgcatttgcatttttgcttgattacattgagtcaatgactttaattttggtcatccttgggtcctatttggtagtttagttcttcatgagtcttgcctctctaccgatcctttaagcctatgttcattatccataaataaagatggatcagatgttaacaatctgtcttgttatacaactttaaaaccgcttacaaggccgctttccacacaagctctacaaggtggggtgaccgcacgcaccgcttaccgttttttaaagcactgcttaggacaaacccgtaatgacttataatatggaacaaagggagtatgtacacaattttctgttaccaacaactttttccccctaacgtagatttaagtacatggtcctctaaggtcagctaactattactattgattacttgatttcgtcgtattcatagtacaatatacgtaatatcaaatttggctgctacatcatttgataggttgctcgtacgatccagcttccagcattattctttatttttttgtaacagagaaatttgtgtgttttcatatgtagatcttcctcaatccactctacctacctggttctcgcatcacatcctctcattttgatactaaggtcagggctcttgcaaggaaatacctgtagcatataaccaggtgaagactctgtaagctccacaccgccctgtattctagtgagtagcacttgccttgtactagttcttctacaattgaatgaacgtagatcctgagactagcctagcagtaccatttactattgaatgaacatagatcctctaatgatcttgtactagaaaagtgctctgtttgtcttttccggagttagtagacgcccattccttgcctgtactgtacttctacccagagattatatgtactagtagtataaaatatctctcacccatcgaagtttagtgggaaatttatgtcgatcgccttgtttctgacatgctctgctgctaagataatactagtgtccttgaccccgatcctgtgaacatggtttgttgcgcatcggtactgtactgtttgtaccatgatactgtagtctctgtagttattatagttatgccaggaaactggagggtggtgctgcagcatttatcagagatatatgaggtcaagtaggtgtatgtagcagcagtaaatactgcaggacaatccaactgaccaggcactgttagctttcaccgactgctttccgatccaagatcgaagagaagaaatggataaatggatgggttatggtcaattgcttatggggacgaagtaaatattttatactataaagctaaaagcagcttggaacaagttatccaaacagtgttggtgtagaaaggttttggagaaattgcaatttggagtgtggcacaaatagtccgacataatttgccccctgtaattaaaaaaaggagcattgcagaactatgtttatacatgagttaggcacctgttcatattcggatttgacaaggtttatggtccctttgtatcaaaagatttgtagaggaatttcaaggggaatcctatatgaaaattttctattttaccttttgatacaaaggatttgagctttccaaatcctataaaattgctatgtaatggttcattgtatgtaggttttggaggaaacttagcaagagcttcaatctcttggaaattttctttttagtctatttcttttatgtgattcttgcatttttcgtacaacataaccaaatgaccattcttgcgtttagcaatcctctgttttgcacttgatttcttatcaaaatcatcgttttttggatactgcattttaaaggagtttcatggcagatcacaccatcacctggttgtcttattgacaaactctcggtgttctcctaatcctaggacctatgtcactctcataaacttaagatgttgtatcatagattgccacacttgccaaagatatgaacaaaccgttagcctcgttttaccaagtttaggttccttcggattatagaatttttcagaggtccttaggtattgggatttgaacatgtcttccaatagaatacattcctatatttaaataattcataggattttaagggccatttgaatcaaacgatttgtggagaaattttataggattcaaatcctgaagaattttttcctatctggtcattagatataaaggattggagattttcaaatcctatgcaagttgaatggctcattattcatagattttgggggatacttagtaagaaagagttccaaccttttagaacatttccttttaagtctattttttcatccaatttctttgttttttctgcaacttaattaaacaacaattcctagtttttcctgtgttttgtaatcctctgttttgtgcttgtattcctattaaaatcatgtgttttttctatgcctttgtttttcaatcacgcgtttcaaaggaaccctaaacatgttcttcaacttcatgatttctctttctatcctctttaatataatcatgttcttcaactccaatgcaaactctctctctctctctaccctttttagtatatgtagcatataatatcaaaatcacgtattttaactatgaattataaaaagggtggggagatttggggaaaagacagccccctaaatactattttgggcaggaggatttgaacctacgtgggctagcacaccccgtgcttacaatgaatcactcgaacacacgagaaatttgcatatctgccactcataaaaactggcttcgctataatgcaaaccctcgaaatgggattcgcctagacaccactcttaacctgcgggcattcgctgaaatgccactttcggccttgaaatgccactttcggcctttcttccatttcgaaaataattttcatcaatttcaattcttctcagactattatgcccctgagtcaactggttcagtcggactcgtattcttctctgtttctcgagcgaccgagcgcgagaaggcgagaagagggtcgcgccgccgctgcctctgctccagccgcccctccccggtcctccccagctgcatcgccccttcccggtccttcacaactgcgccgccccttcccggtcgcccaggtgcgccgcctcctctccctgtcgagcctcatcctcggcaaaccctaggcactgagccgggctagaggagaggagggcgaccacacctgcgccgccgcctgctccaaccgaagcgcggcgccgccttccccgacatccgaggcgcagctggggaggaccagggaggggcggcgcggcggctggagcagagacaacggcggcgcagtggtggtgggcgatgccgcctcttcttgtcttctcgcagcgcgctcggtcgctcgattgaaccgacgagagacagagaagaaacgagtctgactcaacctgttgactcagaggcataatagtccaagaaaaattgaaattgatgaaaattattttcgaaatggaagaaagctcgaaaatggcatttcagcgaatgcccgcgggttaagagtggtgtttgggtgaatctcattttaagagcccttttgaattgcaggaatggaaaaacggaggaataggaaaaacgtatgattgataggcagtataaaacagaggattggaaaatacaggaaaaacacaagaatgaccgtttgattggaccataggaaaaacacaggaatcggatgagagagatagactcaaaggaatttttccaaaaggttggatctcttgctaactttcctccaaaatctctataggattagtcattccataagaattttaaaggatagtatatgattcaatcctttatttcaaagtctttcataggaatttttttttcataggattggaatcctttaaattttctacacttttactacaaatcaaaggggcccttaagggtggcattatagcgaagccagtttttatgagtgacatatatgcaaatttctcctcaaacgcatgcttagaataatttctactctgtattgttttatttcccattatgttccacatgtcattgatatttcaatccaatattacatttttttccccgcgttctagaagactaaacagtgtggcgtaccagaactttgacaattaacacaaacaaatatcgcaaaaggtcgtgaaccaaatacacccaaaacttgtgctctgctaatgtcactcacttgtcaacaaaccggcgtgcagtaatgcgccatcgatcgagctgtcctagcaaatcgggagcaaatccgggggggtgcagatttgctgaagcacgcacatcacgttccagatccggcagagctcgacactgcctgcccccagcgtgcatcattcttccgtgattgtatcaaaacatcagtggccacctcacttgccaccacaaaaacccatccttcttccaaccaaacctaggagcaagctaaagagatatctgaggtttcagccatgtgaaaaaaagaggaaaaaaaagaaggatcgttatcgccttcataccaagatccttgaaatgcaactctgctgctgagattggccttttgatttgattacggttgttgataggggagctaggaaaaggagatcagctgtgtggtgtgtctgattacgattagacggcaggtgatagtagtagaacagtggtgccacaaacccacaaggcgtggattcacggttgaaacgtggtgtggtgcgtatcgttgcactgctccgtgggatcacaatctcgacccgacaagtacgggcactaccttcttgccaatggatgaagtagattagcaagtcacatcaaagatttagcaacaccatggcctagattacctcggcgggttttattgatgaaagcaatagagatactcttgtcccactgattgatttacgtgaggattccaatagttttgccagtttgatcagattttctgtcccctcgaaatttgattacttcaaatttgaattttcaaatattttttaaaatatcttcttagagagagttgttaatacccaaatttagctcctagagtaagaaataggaagtcataatcaaatttagaaataactcagacttgccacacgaggctagtgtgacaatagccattgggccggtcagaccgacggcaagggcggtctgaccggcggcatgtggtcggtcagaccggcaaggccgactctgagtgaggtttgtaagttcttagattttcttgctaaggcttgggattttaaaatcctaattggtttctacctaattgaacgtggaaaaaactctgggaaataagtctacccctcttataaatataaaggagctaagaccgattgaaacaacaacaaatcaatcatcaaaatcaatttatttacccaaacctctatattctacatctccctccttcctactacctatgacctattccaaagtctattctcctcaaatcccccaattgctcatcgtctctctctacggcgttaggggacgtcctagctggccaatcgaggctaggacaaaccggtacgcgtttatcttgacatggtcccttccgagtgttcgtttgatgacatctacccactccatacgacggcgtgtctccggtttctgccttgggttgcacataacgtgctcaaggtgtggcggcgtgattttacgttaacaagagttagagattctgaaaaacagtttatgatttaccagctagtgatctagctactccatattaaaaaaaatgtcgttttggataagacatgatctccaaaaataaaaactttgatcaatattttatattatactatactagaaaaaatacccgtgcgttgcaacgggtgaaggatattttaattttgttattgctatacgatttagttaaggtgatattcactatgagaattcgcttggatatatatttttttctagaaaatcataagttgtagttaggtgtctgatcatctcaagttagtacgtaagttaattttttaaagagatttcttatacgaccgttcatgtatttccaaaagtgaacgaacttaaaaaccgactcaaatacagatctgtatttctaaaaacaaacgaacttaaaaactgactcatacacggatgacgtacctaagtaccaacaaaaacatcttcaatctttataatagttttactgtgagaatttgcttggatatatatttttctagaaaatcatgagctgcaattagaaatccgatcatctcaagttagcatgcaagttttttttaaaaagatctcttatatgactcctcctgtatttccaaaagtgaacaaatttaaaacccgactcaaatacaaatatatatttccaaaagcgaacgaacttaaaaaccgactcatacatggatgacgtaccaaagtaccggcaaaaacatcttcaatttttataatagtagagatatagaaatatcaataaatatatgattttattgaaataatttttaagattatttatacataaggtcttcatgtttgtaacacaaatattttagaagttattcgttgttaagtttttaaagttcaacatcagttttatccgcaacaataattaattttaacctagagaaaatattattttttattatgtagctactaatactactagtaaaaatctgaattgtttaagaagctaaggaatttaagatgtagctagacttgtactctctccgtgtaataaaaaaatctaatccaaattggaatatggacatagagtttgaatcgattcaaatttggattgggttttatatgggacggagtactccctccgtcccataatataagggattttgagtttttacttgcactgtttgaccactcgtcttattcaaaaaatttgtgtaaatataaaaaatgaaaagttatgcttaaaatacttttgataataaagcaagtcataaaaaaataataatttcaattttttttaataagacgagtgataaaaaagtgcaaataaaaactcaaaattatttatattatgggacggagggagtagctaacagaagcttcacacaaacatgacctataattctctccaagtttcacgcgaaaaagatgatcagcaacagctgggcaattatacacgcaagacaaatcgcttctgttcttccacctggggtgctgatccgctgctacagcgttgctactggcaatatggaagccgacggcgacacctcgtttttggccgcgctggacttgctggtacagctaatgatgctggcttttgacgggagggcgagacagcgccgagagagaggcagaagcagggataacaataagcaagatcttagcgccttccgtatcagaatcgctggaaatgactcctcgtcaagattggccatggaacgatgttacattaattgacagcaacattacagattcagagtatagtacccgctacaatcaatgcaatgaactggtaaaaaaagacagaaaaaaaaaaggtgacgaaccgaatggggcagcagcaccaactttagcggaagaagatttgggaggattttcatcgggtgaggatcgatcttttgacgatgatgatggcagtgactgattcctgatggtgaaaacgttgtccgtttaccattttgtggttatttgcgggtacggaacgaaatgcgggtacgtggaagagacggaattaatcatggaaatgatttcaccatgaaaatggcacaaggcagtgatcacatttgtgtcttatgcctgataacgaccggggcctcctttggatttggatgaacttctgtaaaaatcctgtaaaattcttataaaaatttggtgaatccgattagtaaaccgaggaaagaatgagactggtaaaaggaagagttgattggttctggagaaaaaggttcggtacgtatatactgttgactgttgagcaattactgaaagaaaaggaccaaatgaaaagtccctccttttacgttgaaaggctggccaggctaggtttgtagattcttgagcaccttccatgtccagaggagctttactggaattattctactgattgatactggatgaatgggaaatgtttaggccatgattcatcacaaattgctatgcttgctagaatctaaattgtgggccgtgggagtcatgataacaaacacaaggaaaaattaggcatatgattgtaaagctgccaatttgaagcagggaacttttttttttccttttgacgctaactatctcattttgtcatattcatctctcttttccattgggggtggtacaaatggcggacaaaagtgaaattattttaggcctactggcaaaacggagaatgatatcgctagtgacaaatcaaagttgtcccgttgaaatatgccaccgcataattccaggttaaaaaggcctccacattgctacgttgacatgacctataagatgtaactttggatattctattctaattaataccctcttccgtcacaaatatatggcaaattttattatatgacattgtgacttcctgatttcaactactggacacggtaaacggaattgctagattaccgttgacagttttgggggaaaaattttaatttttagaccattagatttgctttaagattcgtgctagaaagtatgagaaaaaataaataggcaagtaaactttcaatttttagatcattggatttgctctaagattcgtgctagcaagtacgagaaaaataaataaattggcaagtgcagctgctgtgatttaacctcacgcccttgagtttgttgaagatatatgctaccaccacgccaacaaaatttgtaatagttttattccagatacatatagtgacaaacgagttacagtgtagttacatatgaatacaggtttttagatagtcctaaaattattctatgaggaaggacattctcaaaacgtgattatttgttgctagacactgtagccattacaatattcctttcggattgaataggagaaaaaacatgagcaatgtactcaggctttcactaatagcacgagctgaggcgatctgctggtgaaaagcttgacgtgcagggagctaggtgaatagatccatgcaatagcagtaaagttttttttttctaacgtcaggctactgccaacgttttatataaagaaggtgtctcattttaagaagtaaacataattaaattttacagtgcctaattaattaggaaaaactgagcgaaaactataactacaataacacaccaacagctaacctaacctaagctatcatgacagagcccaacacaaggcatcggcaccaagctcgagcttgccacccaagcgatatagcagcttcgacttcaatgaaacaataccttaatgccaaaatgaacaaatagatccgacatccacgaaggatattagcccaagctaccaaagaaccacttcttacacacagctagcaacaacaaccatataaagagattgtaatgtgttgtcgttgccaagttttgtcacattcctacagtgaagcggcttctactctactcaacagtaaccaaatgacaatgatggtcacccgccgtaaagcaagaaacgaaaccaacgcggcgaaggcctcgtcaaacaccctaggcctgtagagcttcggttccattgcatgagtccaccaatgaccacaattgcatgcgaaaggtttttggtgctaggaggggtcagcgccagaacaatgcctccaaggaggggaatgacgcctaatggcggtggcggcgtcatgccgtcccatggcctggcaaggcttcgctagcgattaccaatcaagaccccacacaaccatcctgcacaacggccattgttggactaccgcgccatcccttcagcgctcaagcccagtccaccaacccgcaactcaagctggctcgcagggctaccggatcagccaccgccatcccatgttgcacgagccagcgtctccccattttctcgaagctccctatgactaaaactaaagcagtcgagccatagaaggggaggagccctttagagaggaggactcttgcctggcaacagagaagatgaactttccaccacctaaccgcttccctgcttgctaccaaaagccgttgaggtcaccactggcaactgacaaccaccgctggcgcttgggtaaccatgtgtgacccacgtcagcttcctcctcgtgcaaaccaccgccagccacgacctcacactgtgctagtcatgttgtcaggcatggccgcgtgtcgctccggctaaagcccctctggctcctcaatgcatgctaccggtcatcggagccctcttctgaacagtaccactggctttccctcttcgccgccccgtccgtggcagccgtacgtccccaaggccacgagctccagcctcttacctccagggggggagggggaaggccccgccgtcgtccttgcagccgcgtggttttctggctgcctgcttgggtggcagtgaggcgaagaagggaggaggtgctgggtggcggtgggggagggagacaccacccatgtcgcccaaccctagagcgacacgagggccccattcctggtcactccgcggtagcaataaagttgcagtggaaactgggcattaggacaataatagaaaattggcgtgccatttgacgcgccttattttagttagcccgtttgtgcaactgaagaaaattaaatattttttaacccctagtagataattataaatccattgtttttgtcaacattgtttagggcatgacagaaatttgagaacatgcaaaggcatgaatcagcttatagagcacacaaccatctgtgtaaattgcaaaagtcagtcattctattttgatttctataatgatttgtgattaaatttcgtttgtcttgtcatttgatttttttattattaattattctagtagcatttttgtaacgacaaatctttttggttgcttcaattatctaccacaccaatatttgataatgccaaagctcatagagcagaacatcgtctatctaatttataaaaaaaaatatttttttctatattgatttgtgatttaatttcttttgtatggtcatttgattttttctctttgttgagtagcctttttttaccaataaatattttctgttggttcaattaaatggtacaattttgagagaaacaaaagtcatgtgatgttttttctttgttgagtagccttttttttaccaataaatattttccgttggttcaattaactaccatattgtaatgctacaattttgagagaaacaaaagtcatgtgatgttttgtttgatgccaaacttttacagtgggatttgtgactgataatgtagcacagttgggaggccacttgaatctatataaggtgcttaaatcttcttttgctttattttttttagaaatggatccttggtttgatatccatctatatatttttcattttaaaatggtacttttcaatgtattgatacaacaaatctactactatatgttataaaatagagtatagatctttaacttagaacttgtatttctttgaaatgttgtagacccaaccatctgtttcagatatcagattaggccatcacctccctagtcaacgtgtatgacacggcccagctgccacgttggccggtgggaaccaaacctgtgaatccagattaaccagtcgagaatgggcctggcattatcaactcacaagagctttctagagattctggtaagtagatatcttatcgacacgtggcaaaattttggagttgttcagctaagttatcaggctgccacgtggcccaataacatgctagaattctgaccctaaaatcggtataaagatgagggtggcgatggcggatggcttggatggggagaaagcactagctctcattgttgcctcctactagggctcgagaaggcagagagttctgcgccacctctaccatgaccaggccacatgtcctcaatgccgtcaagtggcatcaccacttgccgaagaggcgataggaaggaagacgtgagaactgtggagccatgggcatttctaacatttaacattatctctcttctattcaatcaaaaatgaatattcaaatagatatacgttgtgagagcgttttccccaaagattgacttttgccatatctagaagttagaactataaattcaaaatgtcctaaacatttttttggaaatatatttgatgtttcgcataaaattaatttgtgcaaacttttgaaagttctaaaatatttagtttaaaaaacatgcatgtatatttgttttgaaaataatcttcacagtctcttagacttagattatataaacttattgtaagatgacttcacatatattattcacaggagagtatatcattactaaaatctagtaaagccacatttttttatgacaataatgttctacaaaaatatacattcattaattttatgtaactccctaattatcaaatatattactttgaaaatgtgtatagtgaaatcttgagggctcttttgaaacatatggttagaaaaaatggaggaatagaaggaacatataattttgacaggaatataagttaaatcagagaattataaaacacaaggaaaacataggatgcttgttgattacgtcacaggaaaatgtaggaatctaatgagagagattgaatcaaagaaaatcttttaagatattagagctcttactaactttctcttttctctaaaatctctataggattgttcattcgataggaatctgaaagaaaatgatagtatgtaattatttgtatcaaagttattcataattttttataggattttaatcctccaaattttatttattttttatacaaatcaaataggccctgatcaaagttactactccttagagcatcttcaacagtctctctaaatttgactctccaaatgtctatttaaccaactctccatttcatttgtcaagtcaaattcgatgtttactccaatagcctctccatccatcctctctattttgagtatatggcagcgggaccgtgtcagcctctatacccaattttcctcatctttctccccctcttcctcttcctctttctcttctcttacattccccgaggcaacgacgattgagcaaagggtggcggcgacggcggctcatgacgacgacgacctcggcaatggcccccgaatccacgccgcccggtcaaatccacgtgggggcggcagtcgtggctggagacggcagcggacggcggcgacggtcacggctagggacaatgcggatggcggcgacggtcgcggctggggacggcgtggaaggcggcggcggtcgctgctggggacggcgcggacagcggcagtcgcggctggctacgacgacaacgtagaggacggcggcggttgcgacaggggacggtgcggacgatggcaatagttttggctagggacgacgcggacgatagcggcggtcgcggctggctccgatgcctctctcctttgtgccgtcgccgttcacgtgtggcgtcgtcgctaccttcttgctctagccgggagagagagagatgcggtgggagcgggagtgatggggcccacgaatagtcaggcagagagactgtccaagtttgactagtgagaggtgcgatttagccatccggatgacatggctaaccagatagcgaggctgttgaagggtattttcccctatatttactaaaatttatctcggccagccatttgaccattttattggagttgctcttaataaacatgtatgtacgtagaaatgtcgttgacattttgattagaaaattcaacgatcaaaaatgtgtattggatgttactgtactaaacaataattaaaaaaaacaatattgcgagtatctaaacactattgcgcccagcttttaaaagttggactagctaggtacatggacaccccacagtatcaacttcttttcggaaagaacggcaaagtactgcaataggcaaatcaatgctgtggcaaacaaacaatctagccttgcacgtacacggtaggtcactaatatatttgctgaagcagcagctagctatacgacgtcctttacctcctccaaagcacaggccatgttccctcccaagttcatactactactagtaccagtgtaccacaaatcacaccagaccaatagtatagggttacggttatatacttccttcgtcccaaaaaaaacgaatctagaactggatatgacatattctagtagaggtatgtctagattcgtaatactaggatgtgtcacatctagtactagtttggttttttagggatggagggagtacgtacgtagcgctccagattcgcctatcgagctccgtcctctgaaccatatctccatgactccatccacccatatgcatcgtggcgttgcgccaccgccccacctcgcacgtcgtcgcgtagctcgaatccactcaaaaacgctcgaaacatacgtacgtcggcctcttcccgtggccggtcgttgtacccatcgagagagaaaggaattagtactaatcaacaccgcacgccaccactgcgaaagatatgatgcggcggatcaggacggcttcggtcattgaacaatgagagctagagagtagagacccctagctatagtataggtagctaactattcttagtagcagctttgccacttttggaacctagggaaggaaaaaggggtcgccgtgacgatcttccctgggatatcgtgatcatagcggcatcatcatcgccgtgaaaacgaacgagctgttgacgacggcgtccccccgtctcacgtccttccttcccactcgatggcgctacggaaaagccccggttgtggtggggatccccacgcctcagcgtcatagggtctgtttgagcttgatagttgtagctttctcttaaaattttcagctgccataagctcttcaaataattcagatttttatttagattttaagaaattgtagttgtagatactagaaaatgaattagaaattaaaaactgagtttctcagtttctctatattctcaccagttaattttttatcggctgtttctcagaattttaagctatctaagtaggatcctaatatgtttagctcggctttcaatcgatcgggctatggctagaaacgggacgggatgggatcccctgatccgcgctgccagtctaaaggcgcactcatgtcgtccatcgttcccatcattgcgagctccggtgaaaaaaaatatattttgatctaggactagcagtacgtatgtactactctacgtaccacgatgacgcgacggggaacggagtggaccatgcatgaaaaaaatcgatttcgcgcgcggccatgtggtttactacatgtcatcatgttggatctggccctatatatatatatcttggtagttccatcgagcagttgcaatatatgatacaagttgcaagtccatacagtattcgtgaaagatataatactggtatgcaaggttattaatttaatccttggcaaatatacgagcagtgtaaaagttctgttttagattatcacaagctaaaagctaagctatagattcaccggaacaccaccatggagggagggatactaattgcttctgtggaccagcatctaacaaatcatcatggagcagatcgggaggactacggagatattctctcgatcgttggcttagcacttagtagcagttccaaaagctcgatgatgacgatcgcaaagatatgcatgatagtataaatcaaactccccggagaggctctcatgtagtagcggctctgctgctttagagcaagtttaatatagtcaattattagcttcaagccttcaaataatttatagttaatttaatagtcaattcatataatagttacctataaatatatattacactattaatacataacccccaaatatcatacacacattatgtcttaaagtctatgctacagctcgctggctataaatctgcagctcgctgctcttctgtctcatttatcttctagatatgtgtttatagttgacttatagtctgttgttacacctgctcttagctaccagctttcgtctttcattatattttctctgtacgtacgtcttccaaacaacattgtctcgtctcttatctatcccagactgaccccaccggacgatgaaacagttggatcttgagtagcagcaatcaagtgatcacgtcaatctatcgagatcccacgcagtggctcataatctcacatggcggcctgcctcgcactttttccttatccatgctaagccccctgctcctcgcagaaaagccggcagcacggttgcttttgccctctttaaccatcacactcttcttccattcaccacctcggttgtttgtttggtcgcgtgcatgagacctggctcgcgaagcgtacgcaaccatatccaatccaacgagagactcgtcgccggccaacagccggcgtccatgcctccaccgtgcaaacgcataagttgcacagtgtttaaatacacaatttgtttgtggtatactcgtgcaattattgtaagtacgtgaccccgacgacgcaatccaccgattcgatatgtatctcgatcggtcgtactagaccgagcatcccgcgcgcgcgcgcgcaaaatctccgactctcggatcagccacagtggaagatcgtcatatatatatcagcctcctctctcatggcttgttgggggaataattctgagaaacagctggttggtcgtcagcttgaatctgaaaaagttgggaaacccagcttctggcttctagttcattttctgaattctacagctataacttcttagaatctggaccaaaagctagactgtttaggagagcttctgattctcgaagaagctgcagcaggtagaaactctccaaatagaacctcagtctctctctttttctcatcgagtgattacctcgccgtacgcatatgatcctgcggcaaatctgtgccttttttttcctctctgatcggctactgtactcatccgcgtcagcctcgaatcgtagccgttaattatctctgatccggtagatagcccgtaggccgtagcatatgcactgcaaagaaacactgcatggatggtggctcttgctcttggtaatcgatctccatgcatagcgctaggccactgcagagggggtcccactggctttgttagcttcttttccagtgagactgtagcagtgtagctgccctgtgcctttacgtagggttagtactcctactactgtttgtttgttcagctcgtgcttaagttgcgtgcgacaatatttatacaggcaggcagcaagttgcacgtgaaattcgtctgctggttgctgccgctgcgcagcatgatttggatgtgtatgtggttggagtcttttcccacacatttggccggataaacccgacatgatttcctaaccgcgcgcgcttggagatattccgcctggtgtttaccatgatttctcgttcaatcctccgagcgaagtcacaataggcaatgtcgcgcgtttcacttgttacaccaggatttctgaggagattcaccgaggaggttgacacttgaaacaacacgatcaatagtttcttaccctcttcatattcacaaatatacgacaggcaaaaaattggtacgtgaaattcgtctgttgtttgccgctgcacagcatgatttggatgtgtatgtggttggcgtaaaccttatcccacacgtttggccagataaagcccatatgcatgcagatgcagacatgatttcctaaccgcgcgcttggaaatattccgcctggtttaccacgattcctcattcaatcctccaagcgaagtgacaataggcaatgtcgcgtgtttcacttacactacgatttctgaggagattcaccgaggaggttgacacttgaaacaacacgattgatagtttcttacccccttcattcacaaatatacagcaggcaacaagttggtaggtgaaattcatctcctgtttgccgctgcacagcatgatttggatgtgtatgtggttacacgtttggccggataagcccatatgcatgcagatgcatacatgatttcctaaccacgcgcgataggaaatattccacctggtttaccacgattcctcattcaatcctccgagcgaagtcacaataagcaatgtcacgcgtttcacttgttacaccaggatttctgaggagattcaccaaggatgttgacacttgaaacaacacgatcgatagtttcttacccccccccccttcattcacaaatatttcataaggtcatttgatgttttagaataaggttcggtcagactcttgagaagttgaacgtataatttctcaaaagcttatttttaaaattatatggtgcatatgagttatgatagtacttaaaaaacacatccacaagtgtgttaagcaatatatactatcttcattttttaatatatgatgtcgatgacttttaggcatgtgtttaatcatttgacttattcaaaatttctgtatagatttaaaaaatataagtcatgcttaaataacttttaatgataaagcaagtcacaataaaataaatgataattacattttttttaaaaaataagaggaatgatcaaacatatctttaaaaagtcaatggcaaaattattgctagatttctaatcaccttcagcctagcaccttggaattacagagggatgatgtgcgacggcgatttctagcagtggcggcatcatcaacaggctcatcttctctgacgatgttgaagtcctcttcttctttgacagtgtagtgcgtggcaacgaagttaaaatttagggtttcggaataaatgttgaagtgggatggcttacccggggagggggaagaaaagggttttcccgggcctagagagatgaccatgagcgacggcggtatgcaatggtgtagtcggggtgccaccagagctgcaaggatgaaggttggtggttggcggggatgtgagctagggaaaggggaggtgcaagggaagctataggttaggagacggtggtggcagtggtgtttctgtggtgcgagtcaccggagttagaagatgacacgacaaggaaatggcgtcaccgcttggcttggggaggaggagatggggagggagagaaggacagtcaaccaaatgaggctcaccgcacaaaggtggggaggagagcaatatcgcagatctcaatctgtctaacttactctcagggagaaggataacatgataagtaaggaagatactactgtccacgtacaaaagtcgatagaaccataactgtccaaaaaattgattgaaatctagggtattttcaggtgaccaaaatttacaagtcctatatctcaaatgcttgttttgaagttatacggtactcggtgcttatgatactacttccatttcaagttataagacgttttgactttggtcaaagtcaagctgcttcaagtttgtagaaaaaataacaatattttcagcccaagataaatttattatgaaaatatattcaagtattgatttaatgaaactaatttgatattataaatattactatatttatctataaacttagttaaacttgaattagtttgactttaaccaaagtcaaaacgttttataacctgaaacggagggagtagtacttataagaaaaaaatgcgtatgcgttgagaatgcacattcaatttagtactccctccgtcccacaatataagggattttcagtttttgcttgcaacgcttgaccactcgtcttattcaattttttttgcaaatataaaaaatgaaaagttgtgcttaaagtactatagataataaagtaagtcacaaataaaataaataataatttcaaaaaaatttgaataaaacgagtggtcaaacgttgcaagaaaaactcaaaatcccttatattaatggacggaggaagtacgttgtatgcgtgtggtgtaccgtgtattgcgcgcgcatgcctgccttatttgctgaatgatggagtatttaaagcatgcatacgcccatcatcaaagaaacacctgtaaacaaacaattatcgtacgtgtagtcagttaataacaagctgtcagattggttgccaactctcatctagctagccacgcacattctggcctagggctggatcggagagttaacgagaacatcggtacgccgacgataaatgcagcatcgatcgagcgagctagccggcccgcgagagcgctgtactgcactaccgctactactgcgtcgtggtactacggatgacaaattggcaaatggccaacctacaataccgtacaagtgcaaccgatctatcgaccgattaagactgtgtttcagcgtaaagtttggattttcgttaaaattagagatgatgtgactaaaaagttacgtgtgtatgacacgttgatatgatgaaaaaggactgaagtttggatctaaactttagatctaaacgcagcctaacctaggaaaaaaaaacatggccgagcttaattaatgaactaataaaacaagccataatatcacacagatccatggagtccgtacgttgacgcatcgatcacgcgccggcttggtcgatcgatcgaggagtgagcgagatagcagtagcactagcagcacacagcacacgggacgtcgtacgttcgtgcagcggccgcggctggggtcagcatcaacacggccgtccggcaacggcgcccgcggcgcggcagtcgtatggcgggtgcgccgcgtccggtaccaaaatacctggacaagaacaataaaaaatggcgccccgtactcctcctcggcccaagtcccctgtcactagggatagcgcctaggcctagctggaattgagatcacctgcagttgctagtatgactacaactttagcagttattcatctaactttggatcgaataacaaggattcagattacacaagagtaatgttcatcatatatattactgtagcaagatgatcttgtagcaaatgttgagaacagtactgctccataaatcttgacagtattgagagcatgagactgctaaacctgtagtccttattcaaactgcacaagatcccaatccgcctagctggtgtagccgctgcgacccgcggtccggcctggtcgaggcttgcttcaggcactgcgaggcgtgcctgcaatttttacattttaatccttttattaaacttattaatagaaaaaaaaactaatagcgcagaaggagatcatgggctcaacatcatctttgaatcgaaagcattgagcctcaacacttgttcgaggtggtacagacttgttaggtatggaagctcaataacataatatcaatattattattagcattgacctctatggactatggttcagataaaaagatatgcatgctttaactaataataaaacagggcgactctctcatccaatagatcatggttcaaactccgaaccattcacctctttttatttctttttctaacaaactttcacatgggaattatgttaaggttgctaccaccttgaataagagattagtgccaatgtcactactttgaaacaaatcatcacctcacaggataaggatgttactgggcttaaggtctatttctgtgattactccctccatcttaaaaaggaatgaaattctacgtataaacacatatagatctatttctgtgattactccctccatcttaaaaaggaatgaatttatacttatgaacctggacatatggctctccaaattcatatacggtagagtaatcgttttttagggtgtagttaattttccgagggatctatttgcaataaactttatgaaatgaatattccatgaaagagggaacgcgccaagtggagcagtaactcccccccgggccgttttctttcctttgatcagtcgctgaaacggccggtcactgctcatcagcaggaacaaaagctaacgacagagaggagaacgagaggggggctggtctgatcgtaggtgcctgctggctatggagagcagatgggcgcacccacgcatggcacattgtcacaatgtcacgtttaggcacagtcggagaagagtggacacacacacacaatagctagtgatgagagatataggcggtgagggtctctttataaacagagagctgtgagtacagcaagtttaggacctgtttagatcccgccaaaagttttacaccatatcagtagcggagccataaattactaaagagtagggcttaagtagtgagttatttatctttttctaaatttacatggtgatttaacataatttagccatgattttgaaggcaggcctagggtctaagccctagctgccctaggtctacctccacccctgcaccatatcacatcgaacgtttgatcacatgcatgaaatattaaatatagtctaaaaaataactaattgtacatattgcgactaatttgcgagagaaatcttttaagccaaattgcttcataatttgacaatgtggtgctacagtaaatatttgctaatgactgattaattaggcttaataaattcgtcttgcagtttactgataaattctgtaattagttttttttattagtgctcgaacaactcacgtgacaccctatataatatccaatgtgatacgccaaaactttacacccttggatctaaaccaccccttaatagtatagccagctactagctccaattcatatataaccaatccaatagcttattcatacaatagttcctatcatcatatactacaccattaatatttattcacatatcttagaagtctatgctatagtttcctatagaagtctatgctatagttggctataaatctgtaacctctatctcctcttctctcttcttatccgtatgtgtttagagctgacttgtagggtagtattgtactcgctcgtataggccgcgggctgctggtttccaaggataataaacgcacgacgaccccggcctccttttctttcctgctatatatatacctcctcaccccacaggccacacccgtccaccccccgtaacattaactcctttgttcagcttgacactccattgcagagggagggtatagctggtgacagagagaaatgggcgaggaggccaattgcaacgtcgcgatggagtccgctgcgcccaaggagaacggccacaccaccggtggcgccgcggcggaggccaaggccgccgccgcctgggctgagatcgccgtcaccgacgccgcggcggtgccaaagccgacgccgccgcctgcggccgtggccgtcgacccccggcttcagggcatctccgacgccatccgcgtcgtcccccacttccccaagcaaggtccgtctctcccctctcggttcgccagtttgccatatgtgcaaatacctagtggtatctgaatatctgcgcgcgcggcgtgcatgcaggcatcatgttcaacgacatcacgccgctgctgctgcgcccgggggtgttcaaggacgccgtcgacatcttcgtcgagcgctaccgcggcatggccatcgccgccgtcgccggtaaacactttttgatcagtactactctttattgtcatttgattattgtttctgtcgcgcggagccggagaggtgggcagtcaggggcggagaggcggtgttctgagattccgtaatatctttgcgcgagatctcccctggtcctctcctggtccttttgctcccccatgccttgtcgtcgcccgcacgcacatcgcctcccgctgcacttttccgcgtaactaccacccccggcgccgttgctttcctcgggagaataatactagtagtagacgctagtattatcataaccacttcggtgatcctctcacagcgacaggacacacacggcctcacggcacagtgctctggccggccggagccggcaggtaccggctgtgttatttccttgaagttctcaacctctatctcgtttttccgtacgcacgcttatatttttttataaaaagttagtttctatatgaaaattgtttaaaaaaatcaaattaatttatttaaaaaattttagctaatacttaattgatcatgtaacaatatatgcttcgttttgcgtgccggtcctctcgaacgcagatggctcgtatcttgggtggatacagtactatgaacgggactgtgatcgtcacgatcgtggactgataaaagacctcctggccctacaggggtgggggggggggcgtttaatacagtactaactctccgctggtcacgcccccgttctgccagcgccagattcgctacgattctgccgcggaaatttgccggttcgtccgtctctcgggccatcaaatccagggccacaccctacgagcttatcaacgggggtggtgggtgtttgtctacgctacgtacgcatcgcggaggcagccgtgcgctgcgccgagccgagccgggccagaatgtcattctggccccgtgcgctgcactgcgcgcctgcgccttggcccccgcccatgacgcgtcgcgtttttccaggcttctcgccgagcctgccgctgctgctgctgccaccaccgacccgtgtgcagcacagcagcggccggaatctgccgcattcaatagcgtatcgggggcgcatgtagaagccctggcacgggcagatctcgcggcgaggaggcgagaggtggggggaacccaaggcccggaccatcggacggccccagcatcgcctgcgtgtgatcggacggtggggagggtgggggattcgtggtaggcctaaaattgattttttttattttatttttaccccactggaggggggtggctcactgatgtcatgcatgtgcccgatctgctgtcgttttcactggaaagtactgcttctgagattttgctttgttgtttgttggatactctgtctggctccctgcgattccttgttcctggtttgttttccttctgtttctcctcctccccccctgttttcgcttattattttaacatatatctcattccttgttcttgacttttaatactactatcagcttggcaggttgctagttaatgtttcattcctggttgtgactttggtttgtttgaccagggattgaggctagggggttcatatttggcccggcgatcgcgctggcaattggcgccaaattcataccgttgcgtaagcccaagaaactcccaggtgagtgaggctcgctctctctctgaaaaagtgttgtgcaaatctgtttgctggtgatataagatatgattagctcgcgctggcagcctagttaagtatgcttagttaccttacctgtttataaaagagctgctctgttccattactctgacaacaaagctgtgtcactagtccatccctttttatgctgcccatgatgtaatctgaagagatatgatgtactttctgtctttgcactttccatcacatgttctattagagtatcagatagacacatactgtcgagggtctcttttacacattttctattagagtatcggataaacacatactgttgttgttttttacatacgctgttgtgttgtgcaccacctttcttgtaaagtatgattgtgtttgccttgcttatcaaatcattttttgcagtaaccgccatccctgacatctgcttttaatttttttctacaaacgtgaaaggcgaggtgatttctgagacgtatgttctcgagtacgggaccgattgcttgcagatgcatgttggcgccattgaacctggtgagcgtgtgctgatcgttgatgatctggttgcaactggtgggacactttgtgctgctataaggcttcttggtacgcactacttcttaatctgaaatgcattttaaatgaaacccttgatccattgtgatactatatgcaactagtagtatctcaatagagcttggcaaaaatgctgacaacaatcttgcaatgactatttatttttctatgtggcttctgtgaaatgcagaggtcttttccccgttcgcacattcacaacacgctattcttctggcctgtaacagtgaagctctcgattgtgccttgtgatcccgtgacatgtttgcagcaagcactagtgcttggcagtttgccacaatatcaaattatccagtaccgtgtcttgaaactgtgcccacactccgaacatagtttcttcacactattaatccaaatctatagtactgcaggaatagtgtctgaaataaatcgagtagtcatgaaaagtaataaccaacgacaggcatccgtacctgctagtggtgaccggtggaggaccatgatatcttcgttgcttataggcatactgttgtccttaatgcgatgtgactctataatcaagacaatccttgtttgaagatttttgtttggagagaatcttggctgaagatatgtcctatggagtttgcttgaggacatgatttgattttgacactacatgtttcgagtactcctgtcgtagtgaatccagtaaccccacctcattttctttttcagagagataaccccaccgaattactccaggccagtatgatttgtcaaaacacaacacaggctacatcacaaaaattggtagcggcaattttctctttgttactaacaaacaaagcacaatgataccatactaaaagtttggtagtgtcaaattttcactcttgctggcctagccttggcagttggcactactaaaattttgtagggtcttttcaactgtatatatcgtgtttttttcatgttttaggccatcagcaattgcatttgacatgcttcctttcttttttgtatctaaccaacctgtgcttcaactattaaagaaaaagttgttcttttttttagctttagactgttcgggcacttcactggatgaattataatatctttgtcccaagaacgaataactggattttggcacgactatcttacctagaaatttgctttccagaacgcgctggagctgacgttgttgagtgcgcgtgtctcattgggctcccaaaatttaaggtattcttattgtcacattattcacggttatccatatattctttgacaaacatttccgacatctctctacttagttgtcactttatgtagtattttacatactgctctggagcatggatccacattccaaagatatgaacgcagttccatccaacagttttgcacctgtagtacagtattaactttctcagatgctttctactctacctgacgtagcctgttagtgccatatagattggactcttgagccaatggtttgggtttagatagcggccaggaacaactttgccatactaaatagcaccatgtctattctgctccccacattgagatactcatatcagtaccagctgggcatccatagatttgaacaagaccactcgagaattggtgggtaattgttttttcttccaaagcaggactatagtccttttttaaaaaaaaataaataaataaaagaagccctgtttgtgctatcctaagaacatattcaactgtggctcttctgctgcatttgaagcttactatttgcatcctgcccctcatctgaaagtttgctagggatgaaaaatattcaggtaggagtaaaaccacagcactgtctacactagtttcatctggtcatagtgattattttgtttgagttgacataccttgattcatgttacaacttgcaaaatgagtgctacactgccggcatcttaccgaagtcaggatagatatcatgctggttcagaactgaagaagattttttaaaaatcagcgacaatcaatacacattgcttttcaaattgcatggtcatttgtaaatgttgtagttgcagttgatgtaacgaatctttcgattgtcttttgatgtttttaaataacaagttttttgcaatagagaagtggtgccatcatgccatggctatctgttgaaatcgtctaactgagatgacaactttctgacaggatttctacaagctcaatggcaaaccagtttatgtgctggtggagtcccgcgaatatgaaaaataaagagattgatgatcaggtcagcctcactggcatttgaaacttaacaatagtaagaagtttgattgattctttctatataaaacctaaacacatcctattgcctgatcaggttgttcaggtcattcttgtcatgggatttgtttgacttttccgtttgctctttcaggaatgcacatggcttcattccttacaaattgcaagtgagcgctggacggatatcgacaagtctgcggtacattattaaggctaagctagctgctaagtattagaggggaggtgagagagagcgagagagagagagattggtgagtggggagtagttcttgtaggctgagtagtactagttttttcaggggcactgaaaaaagagcttgtagtttctgtcgggaacaccgattactagctgaaacatcatcagttctgttcttcttccattgttgattaaaatttccgtggtttcgatcttccgcgagaacacccagcagcagcggaacagatgagctgatagcttcttcgtcctcttcgctcgtgcatgtcacatctgcatgcctttgttctgctccatgtcagcttcagcgtcgtggtcggcgtcggcgtcggcgtcggcgtcgcaggcgacgtgctgccctgtcaacaagcatgtcgagttcgtcaggttgtcagtcacgcaggcaatcgaggcacgcaggccttgccggtcattgccggagcccggagacaccgacctgcctcgtacggtcgtactgtacactcgtactcgtgaccaggttgccggctcggcagacgacgctctctttctctctcagccaaggagtggtaggatatgctgctgccgctgactcttccggcatcgaaaccggacggggagccggaggacttgggagttggcagcgacgcacgccgctgccacggtaacatgcggtcatacggtgtggcgtcgctgcctcagtgctgcaggggcagcagctggacagatgtgaaagtggcatttgggagttggggaaatagcagcagagttggctggagcctggagccaccatcacaggcagcctcactcgtctcatccttgcccagcccacttcgcgaccaagaaaacatgggccctcaaaagagatcgtgcggatttttcaatctggatttttcactatttggttcttttaaatagcttatttcgtaaatagatccaaaaaaaacttatcccagaaataattctttttcggacgctagaatcgatggcgcagtcgtccaacaggacagtgccagcctctctggcgccgtcctcctgccaccgtggcagggtggcgttgaggtggcagggggagcgcgctaatacttttttttacttacgagcacagaagaaccaaccatagaaaaattaaactcaaattgatgaaatatgtgacttctagaattttttagaagctttaccgaaaagccccacgggtgctctatccctactcttcgttgttttggtttttcctatagtcccaaaaaagtagattagattttaaacactcttaacttttttttacatcttttacatttagggtttgtattttttttttgttacattcggcttacaacaagcgtaactttctcatacggactcggaatcaggcagataatatatccacggacatttatagaaaaggttatattcaattctcccccgctttgctgggttcagcaaaattagaatctccaaattctacttgcaagattatgttttcgaggcgagaaacttttcggtagagctttggaaaattttataagtcacatatttcgtacatttgagtttattttttctatggttggttcttgtatgcttctaaacgtgaaagaaaaataaaaataatagttgcacatctctctctcctctacactatgcgggggacgccagccacattggcgcgctccccctgccacctcagcgccgacccaccacagtggcaggaggacggcgatagcgactttggggccccaaaatggaccattttttagataagtttttccaagtgtctatttacaaaataattttttcaaaaggactaaattgtaaaaaatccagctcactcgatagtttccgctggtggtggtgttgagcttttgatgacgctttctgattaacataccgattttaccgctggtggtggtgttgagcttttgatgacgctttctgattaacataccgattttacgtatgttttcattaacacgatttttaaattactaaacagtgtattacatgtgaaaactttttatataaaaattactttaaaatatcaaatattcatctatcaagtttatattaattaaatattaattaatttctcgttttacatgcatgaatttaattcatctacatcagtttcctcggttgaaatctttggaaaagctgcaggaaccgctggtagcacatgggagggtttgagacgggatgccagtatgccactgccagcaaaacctcagtgtttcagtgtttggctgtttgcagcacagtgccagcaaaaccggctacagcagtggatcttgttcctgctcagggcgttcgtgtgcaatggctcgtccaattggctcgaagcttatcctttttctctctctcatagagaaaaatgtgaaatggatttgggaatcatgggtacaagcactcctacgcgggccaaatacgttgcaacttgcgagttgcgatacattgcgctatggctcaacgacgaatggcacacgtacaatcacgaacattgtcgcagggcgcacctagacgagacaacaagaacaaggataaagttggacagtcagaggcaaatgcaatttgatgaaccggcagattacattggagcatatatgccaaaaaaaaaagaaggtagtactaacatacactggtggagaaaccatctttgctcggtcgacccaaatccacagtagtcccggttccattaaaaatcgggagtaaaaacgatttttagtcccaatttataagaacaacaggactagataatctttattcccggttggtgttaccaaccaggaataaaaatctaacacgtactatataatccctattacttatcctcttatatcgtccacacaacaaactctctctatctctttttttcctctctaactctcttcctctttcctgccttatctctttctttttgatagatcgagcgagagcgctgccttatctctatccagatcgagcgagagcgagagcgggtcggcgcggcggcgcagcggtggccggccggcgtggagaggaggcggcagcggccggccggcgtctttgtgaatttttttttttagaatttgtgatttattgcatgatcctgtgatgtattgatttgtgtgtgatgtatttgcgatgaattttgtagaacttgtgatgtaatttgatttgtgtgcaattttattttaggatttatgatgtatttgatttgtgtgtataagtaactttaaagatttgtgatgtagatttgggatattaccttgatttggtatttggggtttaatttgggatacgcatctcacttgattcgggagaaaataaaaaagaaaaaaaaaaggatggggcatctagactgctgttatctcctctttaatcccctatctttagtcccggttggtgttaacaaccggaactaaagatcgatctttagtcccggttatttcacccgggactaaagatagcgatctttagtcccggatttgtagccccggttaaataactggaattaaatgggggttacgaaccgggaggaaagatggtttctccaccaatgatattaccatgcaccaacctgtctggtctcaataccgttcatttaaccgcttaaagcggttagatttagtaacaacctctacctatgaggatacaatgttttgctccgtttgcccatgcttaaaacggaacgcattactgctctccataaagcgcactacccaaaggtggaggtgtatcacacaccatgatggcgtactaatttggaggtgacagctactatcaggatttgctcggttcaatgacgctcaaagcaaaaacgcatcaaccaaaaccggaagtacatcatataacaatgcctaattcgtatcggcaaatgacgccttaccttactaagcagatctgctaatccaagcaaacactcgaaacgctcgaacaacaaaagcagaaggctgttgatcacacatccagtggataccaataccatatccccaagatttgctcgtttatgtgacagcaactagcagtagaaaaggataggagtaacgcgctgccccttaaaatatctcgaggtgacacgcgattccccggccggttcactcgaaccaggccagcccaagccccatctctatctagcccggcccatcaccccgtcaaaagccacacaacacatgacggatgatgccccagtggatcgacgtatcccgtcgcgtagatacgatttgcttgtttagtatactgtcgcgcgtagcgaccgagcgagccatcagagcaagtttaacattacagccaactaatagcttcaaatcatctataattaatataaaagctaatacatataataattacttactacaatattaactagctgggtgacccgcgcaattacgcggctaacacccatacaaaattatatatttttaatataattttacttaaaatttattaaataattatctcgttggaccaaacattatcatcactgtgtttttaattttatagtttttataaaagtcacacgccagttgataccccttaattatgtcatatcttttttttatttgctttctcgatctagcactgtttctattcgttcttcttggaacatttaaaaattagatcatataatttttagagtttattgtcccgccgggttttgtttttataatttataaaagtcccatcaaacgctgccattatactcctctacggcccgtccactacctcttctcttaattgtcattggtattttaaaaatcgaacataattatcgtttaggttcattttttttactttctggaagttccaccaaaacgtcagcgactttatcactgtactccaatacggctcgcccgctgcctcccttctttactctcattgagattttatcattggttttttttacttttcataagcccgaaccttttaaatttggaccttatagtttttataatttattgtctcgttggattttattttttataatctttagaaatctcgtcaaacgctgccactatactcctctacgacccgtccgccgcctactctttattatcattgggattctaaaaatcgaacataactatcgttggaattcattttttttactttctagaagtctaaccaaccatcgtcggctctgccattgtactcctgtatgaccctcccgccgcctctcctttttattatcattgagattttaaaaatcaaatatggttatcattggtttttttttttactttccgaagtcccaccaaccgcctagaccggttgcttcacgacctgcccattatcattctatttagtgttttattaatagattttagatatcccatcaaccgccaccactctactcttttataggcctattacttaattaatcccgtcatgtgttttagatgatcttttcttctaatagtctttattttttatcaccaattttaattatttataaattgtattcctagtttaaatcttattttaatttttataatttcagagtttattttattttttatttcaaaatttaactaatatcgtattgtgttcttttaatatttttattttttatttttatttttagtcgtttcaaaattatattcctgcttgaactctctttttaatttgtccaatttcggattttattctatttttcattccgaatcttaattagtattattgggttcttatatatactcttatttcaatattgcttatatttaattccgaatttcagttaattttaaattgtatttctacctgaactcttcttttcttttcttttttataatttctatttttttattccgaattttaatattttcgtattgggtttttatatagactcttcttccaatattgcataattttaatttcgaatttcagttatttttaaattgtatttctactcaaactcttcttttccttttttttttttgctaatttcagattttattttgttgttctgaaaattaattaatctcgtattgggttcgtgtgttagtttaccatgagcctatgcttttcacagtaaatctagaattctaagcacaggagccgtgcagccagacagagtatgaagggccggtcggcactcggctcctgggcagctgcaattctaccccgtaacggtttcattaaagaaaaggaaaaattcgtgcggctgcaatcctaatcctactccttaacggtttcatcaaagaaaaataatccgattctgcctgattccaaatatgagcagtagattgctatatttcatccacaacttattataatttaaaaactacaattgtactacatatatattgctatcaacctacaccgttataatttagatccactacgatctaacggtgtagatttttctttttttctccgattaatgtgagaatttctagtcccacagcgaacgtggtgcctcctttcaaggctgttttaataatataacagatagatagatatctggtcctacctgttatacacacattacgttctgaagtccgtgttacagctggctacagatgtatagtccgctgctcttctctttctttatttatctttttaaaatataatttatatctggtttatagccctgtaattgtacttgctctcagtggcttgtggtgacatcgcgcattcgcaggtcaggtcgagataagagactccactcagccggcagggctgcctcctcgtgttggctttctggtaattttctttccccccaaaaaattttccggcctcgacgtggtcgatgcgatccatccatgatgtgatgtgaccaactcaccaacggcggaaagccaagcccatcgagcgaagcgaaggccgccgcggacagcgagagggcgcaatttttgtgtagtactcactccgtccacggtataagtgattttaatttttttttttcaccactcgtcttatttaaatttttttttataaatatataaaataaaaagttatgcttaaagtataaagtaagtcacaaataaaataaataataatttttaaaaaattaaataagatgagtggttaaatattgtaaacaaaaactcaaaatccctatattatgggacggtgggagattatgggacggtgggagtaaaagcgtttccacttcattataaaaaaggcggcggccgcgctggccacgctcgggcaccaggaaggcggagagagaagaagttttccgcatcgcgaccgcgcggacgaggcaggctggccgtcggatcgggctgaccgcgtctcgtttagaaatatcctcgtgacttctcctcctcctgagtcgtcgtcgtcgtggtggtgctcgtcctcctcggcggcggaggcttcggggggcgggagatccgggcggcggagatggcgaagggagggggggcgctgctgccgatgtccgcggaggcggggaagggcaacgggggcgggggcggcggcggcgacgatgccgcgctgttcaaggggtccgccatgacgcggcgcggcgcggtcgccgcgctctcctacatggcctgctccggtacgttcccccgatccgcgccgcttcttcttcttcttcttctctgatgcgtcggctgggtctcgggatgcggtcgtcgttagcgagaatttgagggtggcgtctcgtgatgcggctgcgaatttggggggtagcgcgtggttggggttcctgcgggttcagctcacgaatttgtactactactaggtgacttttggtttcagttttggtcgttaattcagttggattcgattatctttgggaagagggccggttggttgacttgtgtccaacaacttcagaaaaaaaagttcatccattttggcattacacgcaaagtacatgctgcgtggtgcttggaaattcgtgggggtttcacttgacggatgtgttccgggggtctgggaggctgcttgcatcttcaacattaaatactaggacaggaggtgctaagtggtcagcggctgtacaaacatcattatgtagtaattactgtcagcgtttcagtgaaaatctacaaggataataaccttttagaagagaaaaactgcgtttggtgaaaattctgaaacttttgtttcgggtttggccatgatggcagatctgcgaagcaatcaaaatcgatagagatctctgagatgcagatagcatgtcgatgataggttgaaaacctggtgatgattgagttgagaatccaatattatgccacttagttgtccaacacagatagtcagctaggtggtgttcttatgaaacagggattagtcacttaatttcacatacggacatcttgttttcgttctttctacatttgttttcatttttcagatctcaggtatcattttactaactttggcaacttttcaatccgcagtgttgctagtgatgtttaacaaagcagcactgtcttcatataatttcccctgtgcaaatgtcattacgctccttcaggtacttctcatgtccccttggatggactctggaaagtctggctttgctgttatgttgtgcaagtgtgcattacacatttacacatgaataacttgcttgtagtctaggagataaactgtaggatagcataatcaaaacattacatattcgattttatctaatcaaagaacattctgaacttccgacccttacttgagcatctgcttagcaatggatattgctaaaggtcttttcatacctttatttgatatcactgttgatgaacttcttgatgcatatatgtaatctgctgctcgcatctcctgcctctttttttttttgacacttaataaacatgtgcagatggtgtgctcaacaggccttctttatgttctgaggcggctaaagataatttcatttacaaatagcgagccatccgtgccttctgatgcgttattcttcgttccgttcagaatactgttgcgtactacacctctttctttggcttatttactctatatggtatgcttctttcttcacttataatacatttattaaatacacttagtcgcatgtattctatttgaattgaatcctgagtaatgttttccatcatggtaaaagttagcttcaatggaatctgtgcgtggagtcaatgttccgatgtatacaacactgaggcgcacaacagtagtctttacaatgacaatggagtatttcttggcaaaacagaagcatacgccacctataatcggcaggtacatgtctataaaaatgatttttccttttttttactgtattataaattcgtaatattctcagaatagtctgacgtgctagtaactaatgtaagcttccttttgtcatatgctttcttatttatttctatatattatttccatcttttggaaaccctgaaattattagtctatcccagtgaactagcaattagtatctgttgctgttttttgttttctgtagcctattgctaactgttgtacctgtatttttgtagcttgaaataaggttgcagttgtagcacttgttttcttacgctaaaaatttccagaacattgttatgttctgaatatgccatattttactttctgattttttttaccatgggtttgtcagcgtggctttgattgtatttggagcatttatcgctggagctcgagacctgtcgtttgatgctcgtgggtatgctattgtctttgtggccaacattacaacagctgtttaccttgctactataaaccgtataggtaacatttcattttcagttttgccacatacaatcccattctaaactacatagctttctaaccagcagttttgttttgttttaggaaaatctagtggtctaaatagcttcggcctgatgtggtgcaacggtattattttgatgacctgtttcatattcataatatccagattaaaccatatttgccttagcattcatatcctatccatttggattccaggacttgtctgtgggccttcagtactttttctgacatatattcagggtgacctgaagaaggctatagaatttccctacctctattcccctgggtttcaggtacagatttcacagaaccatggtcatcactgatcttatttgtgcaatatctaccctccttttatctgtaatgtttttagacacctaaagattccagcacttctgggtgcaccatttttttaaaaaaagaaaaacacaatcatgcctgttcacttcagtggaggagtgacacatccaacttctgttattcttcagaaagctatcaatatcatatgatgttattccgattgtaggcggtgctgctattctcatgcatgctagcttttctgctaaactacactatcttctggaatacaatcctgaattctgcactcacacaatcgatgtgtggtaatttgaaggtataacagcctgcatccagttccttccactccaccaaacttgcaagttgttttttagtgtcctttcatatttacctttttctgcaggatttcttcaccgtcggaattggctgggttctgtttggtgggcttccttttgatctggtgagttaaatgtagtgtttgtttaggatggaaagaagatttgtctccttttccacgcgtgctttccgaactactaaatggtatgattttataaaatttcaaaaagttgctttaaataaccatcttaatctattttttaagtttaaataattaaaattcaattaatcatacgtcaatggctcaacttgttttacgtatcttctcaatcttcacttttcaggaaaacaagttgagccattgacgtatgattaattgaattttaattatctgaacttgaaaaatagattaatatgatttttttaaacaactttcctatataattttttttgcaaaaacacacaccatttagcagtttgggaagcgtgcgcgtgaaaaactagcagttttctcccccttctgcccggaacaaacacacccttaagtcttcagtctttccctgaataatgaccccaaactttcttatggcagcttaatgttatcgggcaaggtcttggctttcttggctctggcttgtatgcctactgcaagatcaaagggaagtagatacggatgtccagtgggggtctgaaggagagtagatattgaagtttattttggaggggccaatgtgccatactgaagtagagttcgtgctgtttgctcctgcatatgggagagaaattttgtaggttttcctgtatgtatttaacacttcagtcctcctgaatacaatttcgagtgaacagccattgttttacatttttacaaggaaatagaatataacaagatttcagtattatcgcgtagtgtacaattggcgtccttttagtttcctacaccgtgctgtgatcatatttaccagacatatgtcaaagtgcgccaggaggagcaccttaaatgcctagttctgtatcaaatattttcacttttggcaagagtgctggaaattcaactgctgatgagttctaacagttaaaaataccatcaaaattcagaataccaagcagcattacatgtctatagagcgacacaattgtcgtactcgtacaattatctggcaaagagcttgtggcggtatgaatattcaacgggcagagagagaagtatttctgcagaaatataacattgcatatttgtgatcagtcagacaaaacttccatggctttagaaaagctcaggggtgctcccaaaacaaacgtgtctacagcctatatgagccggcagaactaacaggtcaaacctgaccctgagacctatgacgttctctcaaggatatggcagatctaaacatagtgtttttatctaacataacccacatcatccaaaattactccgttggcttgtccgggtcatcctcctcaggttcttccttgtcaggatcatcctcctgtggttcctcctgaggttgtggttcttcctcttcctcctcctcatcatcatccagaggatcatcagctggcaatggatggggcaatggtgttttcatagggctgaattttgggaagatatcaggcctcctcccaggctttggtttctcccattcctgaaaattaattaaagatagacattatttcaatgctagcacaaaagcgtaaaaggtggataaaccactgaaccagtgcatattttttgcttaaggctaaagacaaatcacatatggaaagaaaatgcttgctgatgtggactgtaatataaacagaaccatatgaaaaaggagaagatgcttgtactcataactatggctatcatattaaaaattgaaacatgacatgaggtgataattttcccatattgtctcagctagtcagcattacccccaaaaaataaatcaacaaatctagtttcaatatgataacaatcacgaccaacattgaacacatgatggtgcatgtgaatggaagatttcatgtaacatggtctgaccttcacaatgggaaatgcacacaaaacaactgataagcctgagcactgatgttcacttacatactatcatatgaacattatctatcactatactaactctgaaggattaactaacatgtacttctctaggatataacaaactacaagctgtgtttgaaacaagctaaattaattactagcatgatgacatcaagagaacaactgaaatgaaaaggctaagagaaggatatgataggagttcttacttccaaacatgattacttcaatgcaagttacagcaataaatccagataaaatttcgtgcttctatttactgaaggatgaacatttggaactaatctcatggcacggaataataaacagctaatctgctcaacattctacttagagatctccagagttctacaaggttagcttaacaagctctggcctccaaataacctatgataatttcaatggacctccaaacatcctatagttgttttaactcaaacaactccatccacaggacaagcagtgtaagtaaataacatatttgtactccagccgagatcttcttcaaatggcactccatgctgaagagtgacgaattccttcgaaaagtaaggagaatgtcactgggatggctctatctaatagggcaacatatcctatgcacacaggccctcacgtgtacacacgtgcacaccaactaaaaaatgtcaccaaaaaatctagaaaaaatcatacacatactttcaattgtattacacctagggttaaaatcttaacgtcaaattcattatattttagccgtaacaaaaaaaaaaaacaaaaaatctgacagttttaaggttgcaattttgtcagaattttatcttttttgttattctctatgtagaatgaatttgaagatgcgactttgcacgtagatgtaatactattgaaagtacatgtatgaatttttctagaattttttgtgataatttttagttggtgtacacggtgtgtacacgcgagggcctgtgtgcataggatacgctcccatctaatagagcccgtgcaattcggaggagcacataacaaaaaaaaaaatgtccaacctaatgacaagcacctgcgagctacgaacctatatatggcatttcttctgatttcatccacccccaatccccaaatcccatgaatccgcatgctataagctagtaaaatgaccaaaaaaaaaaattcctcaacccgagcactcaattcaacacacacgagaacaatcagtgcataaaccgatagaatctttcacggtgaatcgggaagagggggattattacgatgggaaaatcgaggggcgaccgccgcgtaatcttctcctcgtcgggggccgcgcacaccacgagcgcgtcccatcttcgccgcctcctcgaggggaccgccgcccgcgcgagggagacggaggccaccgaggccccgaggggcccgggcgccgccgccgccgccgccaccggcgcagcggcggaggccgaggccgagaggcaccagacggacgccatggtgaaggcggcggagctggctctcttcgtggagtggagaagtcgggttggaattggggtttcgcgaagtggtggtggacttcttgagcttttcctccaccggaggctggctctctctgagacgagaccggctccgggcgataagagtcggcccgtgtacagtaccgccgacttgctgctgtgcggagtttgctgtgctgtcttagtgtcttgccgaggctgagctggtggagaatttctgcggatgcacgccacagatggagaaatcatgtccatgtccctcggcctaaaaaaccatatttgcagaaacgcccgtgaagagggtaaatactaaatattgtgtttatatcatgttcatactatgtattctcttcgtttcgtattataagtagccttgattatttttctagttaaactttttaagtttaatcaaatttaaaaaattagcaatatctataataccaaattagtttcattaaatatgacattgaatatattttgataatatgtttattttgtgttaaaagatattattattttttttctattaactcggacaaatttaaaaggtttgattagaacaaaaattaaagctaatcataatattaagggactgcctatatatatactagataatacctcgcgcgttgctgcgggatatttttttgcatgacctagagttgtaaacttttagtaatagatattgaccgaaagttgtttcatatagtctaatgttacatgataattaatttgaaaccctgatgtttgtagcagtgaattgtgaagatgttcacctagaataatggaagttcttaattaattagcagcttatttgtttactgaatcacattcaccagtttgttatattcttacgtcatgattgaatggttagcctgattaggttgcaagcaacttctgagctccagccatacgtacaacaaatgaacctgccatctacagtaaaaaaaactcggttagtcgagcaacaatgtgtaggctgcatgtgaagttaacggtgtgtaattaacagtgtatatattttcaaatatatataaaaaatacgtacaacacactttgaacaatagattaagtaaaattctatgggaacatttgaaagggtcagttaagttttacctcgtaatgcagtattgcactttattgagtaaacaaatagctgaaaattttccctagtaaagcttatacatttctagacttttttaaactaaacaaaaaacgtgatatttgcaggatgaattcagaaagagaaaaaaacaatccgtaaaatagaagctacggagaacgaatactaacacacttaactgatggatagtgaaatactgaaatacctgccctgtactgcagatgacgatcagttgcacttctattttgtgtattgatcaaatcatgcacttcatgcaattacatcctttcactacatctgaatcacctgataataatatggtaaggtagtgaatcacctgatgatactatggcaagaaaaatgagaaacaaaggagaaagattagagcaccttcggcaacatcttctattatgaaaaggaaaactggattctcaaaaaggtaaaaaccatgacagttaaaggtagaagacctggggataataaactacctcatcatcagagaataaaggtggccagttgggtagaagcttgctttatcacttcagtttagggaaaattaaatctatgcaatatggtcattggctggaaagaggacagattaatctgagccagctgcgggcctaataccaagatcaaagatgaataatgttaaaaaaacacagagagagaatagaagtatagttgcctacccgcaggataatggcggcaggtgagagaatcttgaccaattgttggcgccaatacattgagcgagcacatgttcttattgtacaacaaatcaatgacttactgcgactccctgcaatgtttgattcaaaaaatcaacctaggactaatcagctggattgaacatacgtactgaataaaattcagttaaatggtataaggtattcatcaccggttagctatttaaaacaaccattgaacttaactctgacaaagagaatagggtaaattgatcattcgcttggagacaactgaataaatttcggaggaaggtttaaggaaagcggtacatacctttttttttttttccagattgaagatctacaggagcagcataacacattcagaaggaaggctgtagataccatatcaccaaataactttctgtacatatcaaatatccaaagggataaaaataaaactacttactacggttatcaatgcagaacatcgtacatgtggaagaagcagagttggtggaggagaacagagaacctgattgaagcattccccagtaataagcgaaggccaaggatgaattcaccatgacgttatgggagcagtaaattgatgtatttgatgacaaccatgaagtctgatctcgaagcagcggtttcgtttctcatgacattccaaagaggaggcgaaaaggctgggaggcggcaggtgggcttgaaccaaaggcagagggagcgccatatagatggagggacacgacgcacgtgggagaggaagtgacgggcaccgccacctcaggtggtgcggtgtatggaactggagggttttcctgaattttttttatttatacttttttttattaaaatatttacaaaaataattttttgtttcgaaaatttacaaatctaattgcctgccgccctcaagaagggcgatttttaaaaatcgccctctcaaagagcggcaagggacctaaatacaaaatttttatttgtgttcaaacccttcccaccggttttaattacttaaaaactaataatgcttattcgatactccaaatgattttaaatggaaaagtgataaactacaaagttatagatctcatcaagatatacaacttttatataaagtttatctccatccaatatcgtttgaaatatagatctgagattttttaaaatgtgttttatattttgtaacgaatatttggatatctaaaacatcttaaatgaaaaagttactaactacaaagttgtagatctccttgagctctacaattttgatataaagttttatttcatctgactttatataatataattttaaattgtaaaattatagagctaacaagttatgctggaaaatttacatttaggtcccttgccgccctgtggaagggcgatttttaaaaatcgcccttcttgagggcggcaggcgattagatttgtaaattttcgaaacaaaaaattatttttgtaaatattttaataaaaaaaagtataaataaaaaaaattcgggttttcctctggttagggatggatacccgttgagttgggccataacatgggcttcttttggcccaataaacaaccggggaactctgggaggctgcttcatggattccctgccgaatgattcagatcgtacggttaatagcaaatggggtgacgtggaagcaccaggaagtagagaattcctagtagtggggatgatttgtatagatatataggatatgttgacagaaaatcccacctcccatctttcaaattttggaccgtcggatatgcttttagattcgtgcagaggtattaaccctaactctccttccgttcccctcccctcgctcattccgtcgccgccactccctcccatcgcgcattccaccgtcaccgccccaccgtgcattccaccgccaccgccccaccgcgtcactacccgcctcaccggctagccgtagggcataaacgcgccagcgagccccccccccccccggccggccccttccccttcctctcctcttctttcctcaagcggatggtggcgtgctgtcccctcgccgtcgtcttccccgtctccggcggcagggcgccaccacctgccgcctcctcctaacacacccttccgctttgcccccgccgcctacaccgacctaccgccagcttccgaccccacggcttcggcagcgccgccgccgcctcattgcccgccggatccgccaccctcccacggccatccctctaaagccggtgaactctcccctccccctcccacccctcccactcccacctcaacccgggaccctaacccgtaaggtcctcaaccggagtctagggtctcgtcggcgctggagaagaagaggaggtcgccggagttggaggagaaggcctggagtacgaatcgcaaagttcatccggtggaccaaaatctgcaagtttttgaggtagattttctttcaacagatcgttagcattcccataatattaaatggaggaagcactaaagtgatgttgtgtaaaaaggatggcgattaagatacagtgatatatggagttcattcttcacaagtagggatggcagtcgggcatgacaggcacgggtagagactacccatacccgtgcccacgaggtaattcatgcctgcgggcatacccgttactatatgacgggcaaggaacactacccatgccccgttgcccgcgagcgccatgtgcccgcgggcatgcccatttacccatcacaaactcacagttcaacatttcaaccacaaatctccacaagcagagagacattatcacaatttaaagaaagggtagagttgtaccaagttcaacaatacaagcattacaagttcatcaatactagatggtggcatttatactaatttgactgagggaccacatgtcagttgattttcgcgggtaaacgggcgaagcgggcatgggtagtgactacccatgcccgtgcccgtatgcccgttgggtataggttttgacccaataaaaaacccataggtactaaatgtagaacaaacccaactctattagggtttttacccatggataaacgggttaaattgccatccctattcacaaggtaccaactttggtgtttgggattattttagaaaaaatggtgttttcagggggcagagccagagtgtagtcaccgcctcaccggaagtctgggctggtcgacgctgagagccttttaattacttccgttgttaaaatcatcttttgaatgggtgtgcatgtatgtatttataagagtgaacatgcacgtgttacgagtgttcgtgtttctactgtgctcttgtaaaaaaaacagtctatactaggaagacgactcacagtggcgcagctaggggggtgccaaagggtgccaacaccccctatgcaaacactgccaccattacaccccatgtttttactctatattaaggttaactaagataagtatttatctaatttattttgtgtagcttgaaagtattatcagtttagttagttagcaagtctaaaaatattagcaagaaatatgatctacaaaattagtttgtgatttctcgtctttttcaaagtaaaatagatgatacttatttgtgagattattcaatattatttgtgagattattcaatagtttacattaaaagaatttagtaataaagagtagtttcatacttccaatgatattattaaatagctaaaattcaagtttttcttaaaggactactttacgcattacttgttattgatggtgactatttgacatcttttgctatcaatattagttattcgatctcatgatttatctttacccccacacccctctaatctcaaatcctgcttcgcccctgacgactcatgtgctttattagtgcgtggtgcgattggaattggtacgtttgctttcctttttcaactctggacattggccgttacagtacatccatcgctttgcaaagcgcgtcccgtgccttcagatcgttggcacaggccaggaccagccaaaaaggagaagaactgcatgcctatgttttcggttacctccgcctccgcgctggcgcgctgcgcttgtcaaccagggtaaaatctaatcttagggcatgtacaatgttctttattagtggtctctctctattgacatataagtaaatttgatgacatggaagaaagagaaaggagaaaaaagaaatatggttgttatgcacgacaacggcttagagtcgactctagcatttattaaagcaaattttgttacatagtggtgaaagaaaggaaagaatagtaaaaaaatattttgatacattaatgattagagtccatattgtctccaactattgtactccctccgtttcgaaatgtttgacaccgttgactttttagcacatgtttgaccgttcgtcttattcaaaaacttttgtgaaatatgtaaaattatatgcctacatcaaaatatatttaacaatgaatcaaatgatagaaaaagaattaataattacttaaattttttgaataagactatcagggttatggataccacatacctaatagtacttgactaaatctcggcaggatccaccacataccatatcttatatggaaactgacctcgagggagttccggataaggaaagacaaccagagttctacatggaaatgacaatgactactcggattgtatccatattggtttccctagttctacttggacaaggggacacctatgggtataaatacaagccccaagccccccttggaggagagaggacacgagagaatcaacacccaccatggaggatcaacacctaacacaatcgacatagaagcctacatacgccaagacacgccgccggatatcgacttcagggataagcacggctagtaccctacggtgtctccggatactgtcaggagagacaaaagcgctatctctgatctcgccgggcacagattcgaggaggaaggctaccatgttgtcgactacgagtcagaccttcaaaccgtcatgtcgataacagttagataggctatcccaaatattgtacttgtgtgattatggtgaataagagcaacgaccggctccggccaacaggatgtagggttattacctgacaattcaggggcccgaatctatataaaaatcctcgtctccgtctcgcatatatcctagcaccaacgatccccatactatgaaataccaggattgcaacatcaaacgtcgacaaagacgaacggtcaaacctgtgctaaaaagtcaacggcgtcaaatatttcgaaacggagggagtatgatgctagcctctaaatagcgtagagctcatacctgactctacttttatacatgcccttagcatgtaccgtctaatcggtacgcgtaacacacttgctatatatttcccgcgccgtggcccgtccgtgcctgccgcacctgcagtcctgcacacgcattggcccgtcaggacaccgggcggcggctcgacgggatgcgctcggtttccccccagaagagagcagcaaatcgccggcttgtggcatggtggcctttcgcctccgccgacgtgcggaccgcgacgctgagcgcggtgaacccgcgccccgcgaatgtaaggcgccggcccaccactgccaccccggtgcgtgacgacgggctgacggcccatgacggtgcggagcccatcgaccgagcggatgcgcacggatgcaacgcggcccaggcgcacgctgttgcgtgcgtgcgtcgtccctgcggttagctcgcttgctccgtgtccgcgtgtcacgtcacgtggtgtatcacccggttgcgagcgtcgtacgcggacgcggtgcgtagtacaataccaattctactacgacggattaggccggaatcaatggcccgtgcctgtcagcccaaaagattcacctggccgtgtaaagcgcctgccacctgcagctcatgctccgacggctgtcgcagggctcgcctgacacgtgttgagcccggcgacaggtatattcagatccgctacctagctagctttgctatcgggttggactctctgcaagtccggcacatgcatgatattcaaccgggggctcacacgatctcttaaaccgttcgtgtagattattagtcgtcgcctactcgcctgtagtactactccgagtatagattaattaatcgaaccgctgcaacgacactcgcgcacaacacatgcattcgctggacgtgtgcgtgggtgtgggcggccgggaggcccggacaccggacacccgcgcgcgtgcagcgaagaaacgcgagggccggccgcatgcacacgcacgggcgggcgcaagatacaggagcataccgacgagcaaccgctttgttgggtagtagcttcgtcgccgagagcacgtacacaagcatgcatgcatgtaaagaggtggtcctgtatagcctaattttgtctcagctccttggacggagccgtgcgacgaccctgtgactatccgatcgtaacccagattattataaaaaaaatcatatatatctaattaagctacgcgcgtaaccgagggagttaaacgtgtacgtgcaccgatcacaggtaggttaatatactgtacttagtaaaaaatcactgcgagggagagactaacatgtgtgtgtacgttttgtttttacttttcaccgctgcatgcacgatggcgtccggtttgacggtcaaagcttcggcaggaagcgcgggaaccgagcgcccggaccggtcctggcgcccaatattctactcgcgcgccgcgaatactctactggtgccgtcgtactacgcactacgccgaggaggatcccatgcacagtagcgccaccaccgcacacgcacgcacgcacgcacgcatatgtgtgtgcaccgcatggggaaccggcctgcccggctccccccccctcctcctcctcacgtgcaccgtggaaaacaccaacaccaagcatcccttattgcagaggaccatgccttgcatgtgtcaaccgctgcatctgcatgaggcaagacagtgagttcagcagccagccagcgtgagacaatctgcatgctgtgcccagcaaccgacattttcctctctctgcagggcagaatcacggaagctagccctgtgtatttacattgatcaatgctagattcgcaagttggtaggtagagagacctgctgcatatggttattcctcttctgcgtacgtgtagagctacccagcgtaattggtaaccaacgaggaatgtgaaaatagcgtggctgacaaacaaagcttgcgcagagtactgttggtaagtcctgccaatacacacacacacacatgatgggtttggatatgacggcaagcatgcaatttgtagttctatacctgcggagatagactcatagaggagcaagttgttggcagatggtatgatgatcgaggtcacctgttgtagctacttatatcccaatgaccagcctagccattagctaactatagctagttgcaagcgagatagcattattaacattctccctgtaatcatgtatatgcatggtcctggagctctgcacatgcacggctagctccccggccggggcgtgatatgagggatcgaggagaggacgggaagctggggctgatcaggcaggcatgttccgtagaaacgttcatggcactcctctcctagctctctctctctctctctctctctctctctctctctctctgcatatgctgcgtgcgtgtaggcactgttcattcctccgtccccagctggtgtgtgtgtgcatgcccggaagacaagggtgtgtgtccttgtagagggcacagcttgcaaccccagctcccctactttattcggggtcaccgtgacctttctttagggttaacctttctcgctctttggggttagctgggcgtttctcgatacggagagagagaagagagagagagagagagagaggagaggcccgagtgatgcggggaagacagtgggtttggatcatttgattatagtaccaaggaatgatcaagaaagataaacagtggagtgaatataatatgctcagagtgagattcacaccagattgacactttctgttctagtcttgcattttcagaatatagcaagtaggttttcaaatgtacctgtacgtgcatattggatagatttctttaaagagttctataagaaacattgatgcttttgcattagccttgaagttttacgttttcacctattcgcttaagaatttaatatctaaaataaatcacctcattttttttgaaaactatcaaatataactgtagtttaattgtagtataattacaatctaactatacaataaatgtatatattataacttagtttcatataacctgtacatataagttttataaaatttataatgtaattacactatagttataatgtagtagctgtgtaatacagttatagtacaatgcagtatatttatatttgaaaaaaatacctaaaatattgtgacaatttttagcaattcacctttgcttagagcgacatcgctccatgcaataatggcagaagaaccatctccactcccttcaggggggctctttttctattatgggtggccatctagataaaaaaaacttatgagagatatatggtgattttctctttcaatttgttgaaaggagttgaaggtttttgttccactcccttcttttgttatcgtaatatttaataaaaacaaaaaagtattttaacctacatatatgtaaattaattgcatattatgcctaacttaccaaatgccttaaagatacatagacgaaaacacaatagtagcttacaaacactcattgcacatatgttgaagtgtcacatcacgcaatccaaggggcatacaaatacacaagttagagcaagtttaatagtatagccaacttgacggagctcgtggctcctcaccgggagaccgcacaggcccccctttgccggttcggccgggggcttagggtgaaatctcaagctctctcggtatgtggaaagatcgccagctaggaagaaacgcgagacacgggcgatgtatacaggttcgggccgctgggaagcgtaataccctactcctgtgttttggtggatttgtgtatgaacaagtaacaaagtgtcaaccagcccccaatcgctctgggatcggatctggagaaggccttgtgtccaaaagtcctctcctatctaagtgggccaagtgtgagccaacctctcacttgttctaggttccgaatctggaaaagatcatcctctttccccatgggcaaggtcctccttttatacttcaaggggataccacatgcacccctccttttcaaactggacttttcttcccttcataaatggacggagatttgcacggttgccctccgaacgtccttctgatgggacggcacatacctacctccacttctgccgggggcaggcgcgtcgtgggaacgtggctgtgcgctgacgacatgagcagtgtcagaccggtcacaaatcggtcattcttgtccaccacgcgtcagcctagcaacgtgcatgtttgcccttcttcacacaacatcttgcctgtaatggttaggatgaagcctggcatatatcgatcggggctaacgtgccatctctgggatgtaacacgctagctccagctggggacgagtgcctagaagctctcgtcttgacgggatggggcgaagcgtgcgtcagaccgcctgtcgccacctaacccgtgatttgaccggtctgtgactggtcacagaccggataatcgagtgcactgcactgtatttcatgcggcgtgacacgtttagccgaggcgcaataaatgcgattaggtgagaccccgctgtgctcacctaacccatacacgcggagtagaacccgcgaggggtcggggcgcctcggccctcgggggcgaggcaggagtggtccgaccgacccccccctcggggagaccaagaggtgggtgcacacatcaccctcgggcccgacgtcccccgagggtgccaggccacgtgggcgattgtgtctgcctcaagcctctagtcatgatactcccggtcccatgtcaccgacagtagcccccggcgttatgccagggcgatcgcccttctcaagggaagcggtcgggcatgacgccactcctaaagcctggtgacaggtgggaccggtctccatggttgggcaaaaacccaacggtctcaaaccatgcacatcggtaatggtaacttggctgtcaataatgggcggtctcttcaagactgccacattacctgaacagcgcacgaatctgggcgagccgatttgcttcgcctggagatatggtgatggtgcttttctcggagccatcagaatagcgtatagcatcttctgggcctgagggtatcgggttttggcgtcccggagggcctcgctaacaaagtagacgggccgctgcacctttcggcggggccgatcctcttcgctaggggccgcatctccagggcgctcttcctccgagaggcagcgcggggcgccctcggcttctgcgccgacgacctcggggtcggagggcgacaggcgcggccttcccgcagtggccccgaggctatcctgacaccgtcggacaagcaagtggagggccaactccggccgtcgggggccttgggccgccgttcggcttgggggcctctcggaccctgacttctccccgtgggcagcgctggaagagttcccttccggaaccgaggacggcgcacgcgcgcaggtccgggacgccgccgaccacatcgtccacagcttcgagggtacggcccctcggctcgcgttcgccctcgactccgacgaggagggcggtgacggtggtgcggacgacagcgacgacaaggctggtgacccgggcgcgtcagagtgagcccccaggcccccgccaatcttgaataactttttctttcttcttccgaggccttcgggcccccttcttgtatagactaatttaatctgcaaccaaataaagaggaaatttctatgtcaattctatttgttgtgtgtatgagacgaggatggtctatgcctcggtccttctgtgtcttggcttgaacaagggctcgtgcccaggtcctagtcctcaaatggctcgggtcggggctagtgcctggggagatccacatgtcgaggctggccaggccgggaacgtggtgaccgagggttatgggtgacccgattgtgggtttttgccgattcccccccggagttcaccacgtcccggggcacggctcggttctgggccccgtttggcgattttagccgacccgagcccccgaggacaggatcgagcacgagcgtgctaattcaagccaagattcttcaaaaggaaacaatggcacagacacagtccttaggaaatcgaaaatgcttttattgaaatacggaagagaaaaaagataagcccccggccaaccctgcacgccccggggggggggggcgcggggttggcccgagcccaagacctgacacccgacccccactaggggtagaagcgacgagggtgttcgatgttccacgggttaggcagctctgtgccgtcacccgtggccagccgaacggagcccggccgggggacgccgatcactcgatacggaccctcccacattggtgagagcttgctcaatccagcacgcgtttggacgcggcgtaggacgaggtcgtcgacgtagagtgatcgggcccggacgtggcgctgatggtagcgccgcaggctctgctggtagcgcgcggctcgaagggccgcgcgccgccttcgctcttccaagtagccgaggtcagggagcgtcggcttccttctttttgtcgctcgcaggcctcccctttcgggtggccagcgaaacgccctcgacgacgtggacatgaccctcatcgtcggaataggccgacctcttcttcctcctcctgtctcgccgccttgtttgagcagcagatccgggggcggccgaagctgccacaccggaatcggaggggttccaggtccatgcttcctccttacgagccactcggtctgcgagctgaaaaagctccgcagtagtctggggctctttggaagcgatcttttcgagcatgcggttgtgccgcacaccccccctgaacgcgtagatcaccgcgtgtgcagggatgcatggtatggtattgcggacttggcaaaaccgctgaatgtacgagcgaagtgactcatcatcccctcgctgtaccgcgtgcaagtccgcttcttcgcctgggcgcggataagtgccttgaaagttcatagtgaactgttggcataaatcctcccaagagtggaccgacgcaggtggcaggttcattagccaaccccgcgcctgtcccttcagggccatgggaaagaaattcgccatgaccctgtcgtcacccccagcggcctcaatcccggtcgtatagacctggagaaactcggtggggttgacactcccatcatacttctcggtgatggtgggccggaaccttgggggccaacggacattccgaagactcgccacaaaggctctacagccgacaccaccagccgggggcacggagggcaggtcctcacgtccatgtcgaggtgacactctggacgaagaggcgccctccgttgcgcggggagtacgccggctattacgccagcgctcgatgtcgaggcgggcatccggctctccatgctgatcctcccgagtcggaggtgccgacgagggagtggcagccgaatggcgtgcaacagccgccgctcgccgcgccctccgccttgacgacacggagccggtagtggcggcgccggaggtcttggtggtggcggaccgtccaccagcacccaggcgctgctgtgccgtcatgaccaagttggccacgtcgtccagccatcgctgggctggagactccgggtcagggacgacgggcgggtgacgtaggagcgcgccaacagcctgaagcgcgccctgaggcgtgctgccgtcgccgtagacgaggaggcgacgctccccatctcgccgttctcctgcatcacccgcgactggcgatgctgcggatttttcgacactctcgagcgcctccccctgcttaggattttggtgtggaggaggtgggggagtacgagctcgacggcgtgggtttggctccccgtcgtcgccgctcacactcggagagaggtcgtgcacctttgcttgctcggccattaggctgaacaagaaaaacttggcgcacacagaggagtacgagagctcagaaaacacacgatgagccccctacctggcgcgccagatgacggagctcgtggctcctcaccgggagaccgcacaggcccccctttgccggttcggccgggggcttagggtgaaatctcaagctctctcggtatgtggaaagatcgccagctaggaagaaacgcgagacacgggcgatgtatacaggttcgggccgctgggaagcgtaataccctactcctgtgttttggtggatttgtgtatgaacaagtaacaaagtgtcaaccagcccccaatcgctctgggatcggatctggagaaggccttgtgtccaaaagtcctctcctatctaagtgggccaagtgtgagccaacctctcacttgttctaggttccgaatctggaaaagatcatcctctttccccatgggcaaggtcctccttttatacttcaaggggataccacatgcacccctccttttcaaactggacttttcttcccttcataaatggacggagatttgcacggttgccctccgaacgtccttctgatgggacggcacatacctacctccacttctgccgggggcaggcgcgtcgtgggaacgtggctgtgcgctgacgacatgagcagtgtcagaccggtcacaaatcggtcattcttgtccaccacgcgtcagcctagcaacgtgcatgtttgcccttcttcacacaacatcttgcctgtaatggttaggatgaagcctggcatatatcgatcggggctaacgtgccatctctgggatgtaacacgctagctccagctggggacgagtgcctagaagctctcgtcttgacgggatggggcgaagcgtgcgtcagaccgcctgtcgccacctaacccgcgatttgaccggtctgtgactggtcacagaccggataatcgagtgcactgcactgtatttcatgcggcgtgacacgtttagccgaggcgcaataaatgcgattaggtgagaccccgctgtgctcacctaacccatacacgcggagtagaacccgcgaggggtcggggcgcctcggccctcgggggcgaggcaggagtggtccgaccgacccccccccctcggggagaccaagaggtgggcgcacacatcaccctcgggtccgacgtcccccgagggtgccaggccacgtgggcgattgtgtctgcctcaagcctctagtcatgatactcccggtcccatgtcaccgacacaactcttagctccaaatcatctatagccaatgtaattgtcaatttatacaatagttgcttactatactattaatatatggtcctacctgtcatacacacattacgtcttagagtctgtgctacagctggctataaatctgtagcccgctgctcttctctctctttctttatcactttaaaatatgtttatagctagcttatagcctgctattgtacctgctcttagctagaaagagtgcgtggttaattgagtcaaattaattttgtcttctcacgataaacacctatagaaaaggggagtgtccagattttaggtgactggaaattttaaataggtattaatagttgtattaatggcttatggtctgttaatttgtactccctccatctacttttgatagtcatatttcatcttggcacacagaccaaggataagtaattctacttattatcatccatttaaacatgctactccctccatctacttttgatagtcatatttcatcttgacatacagaccaaggataagtaattctacttattatcatccatttaaacatgctactcccttcatctacttttgatagtcatatttcatcttgacgcacagaccaaggataagtaattctactcatcatcaatttaaacatgatactagtcattcctcgtaaataagcgattcattaatatttacatttctcgatgctcatgtagccaatcttgtgtggaagaatgaagagtcatgcattaaatacgagaaagttattaagatgatagattgttgaattgaaatatgcctatcaaaaataaatttttcagatatgaaaatatgactatcaaaagtagatggagggagtactagttattcctcgtaaacaagcgattcattaatatttacatttctcgatgtccatgtagccaatcttgtatggaagaatggagagtcacgtattaaatacgagaaagtcattaagatgataggttgttggattaaaatatgcctatcaaaaataaatttttcagatttggaaatatgactatcaaaagtagatgaagggagtaatatgctaatttaagccacttatttatgcatggtgatatgttctaaactcttaggggatgtcatcactggttcacctgcacagttaaaaatgcaacacagatattttaccaaaaatcctcattttttttctaacatctcggtgcattaagattcaaaaaattataccatatcttaaaaaaaatcaactccatatttgtgaagggaaaaaagaagataattaaattgtgaattcacgaccttctatttcccttcttgtgtggatcgagttcaaacactccaatactttagcattccaactaccaaatgtgatcccatcatctcatcttccaagatcatgttcacacacaccgccggatcggagcggaaggtaaggtgggcggccggtttgcatgcatgcatgcaattgctaaaaccagaagtcgatggacgctgcaaaaacacagtcaatcaggcggctgggcatgcagggtcgtcataccagtccaatccagcgattcacctcgaaagcaccataattatagatcagcgggcaggcctaggcgcgcgcccttggctagccttgtgccctattatcggtggtgcccgccgcgctgcaatggctggttggaactcggaagcagtggagagagaacgagagagatgggccatgggcgcgagacgaacgacgatgcgcacgcgcgcgcgcgcgcgtccggcggcacgacatgtcagagaagagagaggcgggttggactgattttttttctgcacaggtgtgcgtgcgcggcggtttgaccggcgttgttgaggcagcgagcgtttcgtctctctctctatgctctcggttatttttttcttcttttctccggcgcgagcgggaatctttcgctggattcgtcgccgttggacgggacgaaccgtccgcgcgcgctaggacccgagcgtgaatccatccacgcgtgcgcgtgcacgtacatacgtcgtatatacatacatagtagtgtggcgatcttaacttgcttgcttgcgcgctatcggatccaagctctgatcgagtaaggtctaagatagattgattaagatccaaggatatgtcgtccctgatcgatctcgttcttgttaagcttatttattcggctagctagctctttcccgccactgcttgcattggtatatatatttggattgatcgagctcctcgatctacatgtcatgcatgtcgtcttttgtttgggttcagattcatactaattaaaaggagaacttgatccatgctatatagtactatatgacaataattcaacaaaacaattgtcatatcccgtatggtttatgaatgcctgaacttttcttgatttggtaggagttaaattgctctccatatgtattaactgacggtaaacaactgctagctccatccgttctcaaatgtgaacatttctaatatttttttgcccccttcagcttcagaatcctgacgaaacaaaagaaacataactacttgctagctaccagcacaacgtctaaggctctgttcttttggttgagttgggaacccatccctccggtacggaaaacgaagcagtccattagcacgtgattaattaattatttgctaatttttttttcaaaaatggatcaatataatttttttaagcaactttcgtatataaactttttgcaaaaaacacaccgtttagcagtttgaaaagcgtgcgcgcggaaaatgagatgggggagttgggaactccaggaaacgaacagagcctaagactagtcttctgctatactctgttcttaacttataaatacaggcctcctagaacatttcccctcctctcaggtggccaggatattttttttcttggcctctctctcctgccatcttcacattgacccaaaatgtagtgcatcccctggaaaagctatacctcccccgtatcagcttccaacttagtacatccctcctctcatcctcaccaatgttttcactgctgctctgatcatcagcaagaaaaccaatcccactgttctatcagcttcttctccccctgagatggcttctgcaaacaactggctgggcttctcgctctccggccaagagaatccgcagcctcaccaggatagctcgcctccggcagccatcgacgtctccggcgccggcgacttctatggcctgccgacgtcgcagccgacggcggccgacgcgcacctcggcgtggcggggcatcatcacaacgcctcgtatggcatcatggaggccttcaataggggagctcaagaggcacaaggtatgcatgcacgcgtgtgtctctcgttttctagtagtacatggagtgatgggtgtttgatcttgatatttgatgttaacgcagattggaacatgagggggctggactacaacggcggcgcctcggagctgtcgatgctcgtcggctccagcggcggcaagagggcggcggcggtggaggagaccgagccgaagctggaggacttcctcggcggcaactcgttcgtctccgagcaagatcatcacgcggcggggggcttcctcttctccggcgtcccgatggccagcagcaccaacagcaacagcgggagcaacactatggagctctccatgatcaagacctggctccggaacaacggccaggtgcccgccggccaccagccgcagcagcagcagccggcggccgcggccgccgccgcgcagcagcaggcgcacgaggcggcggagatgagcaccgacgcgagcgcgagcagcttcgggtgctcctccgacgcgatggggaggagtaacaacggcggcgcggtctcggcggcggccggcgggacgagctcgcagagcctggcgctctcgatgagcacgggctcgcactcgcacctgcctatcgtcgtcgccggcggcgggaacgccagcggcggagcggccgagagcacatcgtcggagaacaagcgggccagcggcgccatggattcgccgggcggtggcgcgatagaggccgtgccgaggaagtccatcgacacgttcgggcaaaggacctcgatatatcgaggtgtaacaaggttagaacaatattggtttgtctatgctactatggctagctacatgcctacatactgatcgatgatggattgctgattcctttcaaatggaaggcaccgttagttagaaaattaatgatctcctttttgagtcgaggcgcgatcgatctatcgagaacataaactatcatcagatctatggttctatactagatagctagctaactgcaatcgaatttagataaataataatgcaatcgctcgatcgagacagtggctatatatgcaactttgagttagtatatagtttatgtgatcctttggaaaggtaattgggtataggctatatatgtagaaagttcattgatctaagaaaaggaggacaatgaaattagatgttgatgatacggaattagtatggagttagactaacttcgttaacaagctaaatatacgattgggaagtaaataattttgttcacaagaaataggagccacactagtattggtaattgttgatagatacgatattactaattctggtattgcccatattctaaccaattgaaaaaagatcaaaaacatgctaatacttttgcttattaatttttctcactaatgttctattgcacacatatgcgcttagatcgaacatgcaaggatgtcaaccaatgtttatatttttttttcagacgtgattttgaatcttaatagcatgcatatgagctttagtaaattacctgctcttgaaattgttggtttcaggcatagatggacagggcgatatgaggctcatctctgggataatagctgtagaagagaagggcagagtcgcaagggtaggcaaggtaatgcaaaatgattatatatcatctcttttctccctccagcataacactacgtatgtatatatgtacacttaatttacagtactgattaagcattctttcaattcgtctgttccccatcgcctaatgactctatccggaatgacaccgttatgctccgcaatgcgcagtttatcttggtatgcatgcaaacgccttcagtttttttttcattgtatataactatattagtgactgcacaatcattatacttgtatcacgactactcaggtggctatgacaaggaggataaagcagcgagagcttatgatttggcagctctgaagtattggggcacaacaacaacaacaaatttcccagtaagaaattaaacatataagtttgtcgttttagttttctagctagcttgttaatagatcatagttttctacacaccacttataatacagtatataaaaattaaattgtgcacttgttgattgcattttcccttttttattataaaatttcactgcagataagtaactatgaaaaagagctagatgaaatgaaacatatgaccaggcaggagtatattgcatacctaagaaggtaactgatgtttcaccatatggaattatcactcccagaatatcagactatcacactgagatatgatttcattaattaaatatgcaggaatagcagtggattttctcgtggtgcatcgaaatatcgtggtgtaaccaggtaattaattgatttatgttttcttcctagctagtagtatacaaaaaagcacgcaatgtactagatgtgcttgttgtccttatttatatgtattatgaactactaatctctaagctatgtcaacatatatgtacacggctcatgttaactgtatatgcttaaattttgtagtgatattttggtgttccaatgttgtaatatagattaacatataatttttgagcaggcaccatcagcatgggagatggcaagcaaggatagggagggttgcaggaaacaaggacctctacttaggcaccttcagtaagctgctacactgatcttagacctgtctcatctaaacttaatcgctctcctaatgaagatccttaaaactaatcaatgactagtcatagtgttatatccccaagatctaagtcatcgacccgtactaatttagtccttttttcttgaaatcttcgtacgtctcgtagaactgaagattagatattctatatgttgccctatggcgcataaaatagtagtactcccagttagcgcattaactatgtccgaaatgtacctttcaaagtttttgtctcaaagttgtctgagaaaaccggggcatggagtcaagggccaagtagaaaaccctagcccctttgaattttaatcacacagctctagctttgccctttgcttgcaccgtccatgcgtgcatgcatgcatgcaatatggaacatgttgcacacatgcgtttgggaaacaaaaaccctaatcatatgcatctgatcatgatgataatcgttgcgtataggcaccgaggaggaggcggcggaggcgtacgacatcgcggcgatcaagttccgggggctcaacgccgtcaccaactttgacatgagccgctacgacgtcaagagcatcctggagagcagcacgctgccggtgggcggcgcggcgaggcggctgaaggaggcggcggaccacgcggaggcggccggcgccaccatctggcgcgccgccgacatggacggcgccggcgtcatctccggcctggccgacgtcgggatgggcgcctacgccgcctcgtaccaccaccaccaccaccacggctggccgaccatcgcgttccagcagccgccgccgctcgccgtgcactacccgtacggccaggcgccggcggcgccgtcgcgcgggtggtgcaagcccgagcaggacgccgccgtcgctgccgccgcgcacagcctccaggacctccagcagctgcacctcggcagcgccgccgcccacaacttcttccaggcgtcgtcgagctcgacggtctacaacggcggcggcggcgggtaccagggcctcggtggcaacgccttcttgatgccggcgagcaccgtcgtggccgaccaggggcacagcagcacggccaccaaccatggaaacacctgcagctacggcaacgaggagcaggggaagctcatcgggtacgacgccatggcgatggcgagcggcgccgccggcggcgggtaccagctgtcgcagggctcggcgtcgacggtgagcatcgcgagggcgaacggctactcggccaactggagctcgcctttcaatggcgccatgggatgatcgatgaagaggagcaacaggagctagtatagctaattaggggatcgatcgattaattaagctagatcaagtcaagtttaggttagacgaatcttgatcacggttgtgttgcaactcgtttggtcgttgatcaggttttgcttgactgggtgtgagtgacacacacgcaaggtgctgccttccggaagctgggtaatggcaggtaagggtataagctagtaaagtttgtgttgtaacttctaagttaatatccttgcttgctgttagttttgggtatagtttcagaaggatcatgccaatcctcagaggagatacacactaattaatctcgtgcaatgacaataactccatcataatatcttggcgctcatactttatttagttgtcttaactcttatcattattgctctatatagttcttagatcaattgccatttagacaatcactagtatttatctatatctataaaaattgggcaatactcgtacctcccacgtgttaaaaagaatggtaatttagccatccttagaaatgtaatggaaagtatagaagtacattttctagtataaaactcaatacctccaaatacttggtactttgaggtactaaaatttagtataaaatttagtagcttagttgttttcttaagaattgtaaaaaaaaattaacctggaagatttggttagtaagtgtgtggattaatatataggttgtaactaatgtatataccgctatctaaaataacagtgataatattttttaataatatgtataattaaagtttggataattataatatcaataacaataacatgtgcaatgcacgggctagcttggtttgtaattatagtatatattattgttatcgataaaaatcctgacaatagaaactttgtatacatgtgtcatgtttgtgtgttatcgagggaatgccaatcagacaaggtacgatttttacacaggtttaagccctccttagagtaataatcctacgtcctgtcagtttggggaggttgctttatttatatatggagaacacaagtacaaaaggggtgtatgtgtctatcataagcctatctactaatcccgtagagggttttgatgaatggtggtatgatgtatgtatgaaagttggactccgctggctctcgatggatcatcgcctccacctcacagccttacttccctcctccctccacatcacggtgggccgatgtgggtcaaacaactctctcatagactccgtcgccaccgctgtgtgccccgaaatcgctcagcctctatcatgcatccttgtctgctaggttcctcgagcgccacaatggttgcataggaaggatgggtgttggtggtggtggtcgattcgatgggccacagaggaggggtctgagagctgaacccattcgatgacatggatgtcagcgatgagctcgtcggaatgccgcttgatcgaccacatcatcatgcttgttgacaccgttggcaatggcggaatgatgcgcggatctggaggaagagggaagggagtgacctcgccgccgtccctctcttctccaccgttaccgagttgggcggttttatgcgacctcacggccgtctccgatgtcagctgccctgtttccggtcgttcctgagccacccccaaccccactccacctccttgctgccatggttgcgatggcagccgccaccaccacatcgcatctcctaaccatccccaagtcattcctacccgctgggcgctgttccttgccagaacacttgatgcatcgaactccagaggaatgagggggagagatggagagaaagaggagaggtagggggggaggtgagtagattgtagatgacatgtggggctcacttttatttttgccaaataagcgcttggtcagcacgagtggaccgggtcaacttgccacgttagcgaaaccagccatagatactgtcgaagtacctactttaactcggttttataagttagatgttaagatttctggtattgcaatttagggatgtgtttgaaactcgatctcaaatgagggatcaaaagtgaacttagtaccaaaattcatcgtaattaggatgctgggccctaataggtgaaccgggcccaatgccatctccctactcggttcatagtcaatctccccgtcgcctcgtcttcgactccccgtgtccgagcgagtccgcccgccgcccgagcttatctccatcctacgagcagcggcgccggctccggcgtcggcgtccccctgctccttccgccgcctcctcgctctcgccggtgagcatccacacgtcctgttacccgcatcctctttctcatctctctccgcccattcttcttctcgaattcgcgttcaaccctagctctcttattagatctggatgcttttcccttttgcgttacccttagtaagtactaatagcagacagtttgttccccgtcaaattggggttgaaatgatcatccataccccatctcaggcccgtccctggggaatgcccagctgaattcaatggctcaagttactgcgaccgcgaatgctcgggtgctcggttttcctgccgccagccgccatggtggccctgtaggatcgcgtgctgggccggcgtttctgaatctgcgtgctcccgcacttcgtcatgacagtaaaaagcatcctttgagaggtactgattttcttgcatatgtgtaattttgcattggatgacaatataagctcgttactgcccatacactaacaagtggagaaaaactgaaaattgttatgcatacaggggtgaaatcctggatgatggtctttcaggaaaatgattgttctgagaagttttatttttattgggatacaagtttacaattaccatagttatagtgaacgcacacttgatgtttgtagacttgttactctatcttaaacggtgcatcaattgtgattaagttacttatcagcttcttttttctttttttaaggtgtatgaattcatatttataacatgttatttctttgtttcagttggtgctgcctcttcattattcacaaagtatgatcctatcaaaggcatcaaaccattgctgtcaattgacaagttacgtcctagaactcaagttggctgtcgagcatctttatcatcattcagcttccctgagttggagaccaaacctagatggtggtggaggaccttagcgtgtgtcccctatcttctgccgctgcacaacatgtggtcctttgcagatgctgtgtaccagcttcatccatacttgcagcagtttgggttgttctatgcattcatcgacacaatggcgttagtcccaggatggctctttctgatgatcttcatgaccgtctacttctttgtggtcaggcggaagtggttgccacacttcttgcggtatcacgtcatattggctattctccttgatactggttctcaagctctggcgaccatgtgcaactggaatccaagcattgtttatcagggtaaaccaatggtgtttttctggatgacgattgccttcattcagatatccacagttcttgagtgcatgaggtgtgctctggcaggcatgtatcccagcgttccgtttgtatctcaaacggctttcatccactctgatatgagtatgttcaggtagttggttagtgcaatatgcatctttgaatataagaagcattaagggatttttatacgagagatttgaaaactgctgagacagtaaaatgttgggaattatgagatacaagaggtggggatgcaaggggatgaaatcagaggcaatgcttatttgcagtgttggcacttctaatatttgtggcctggagagttacttgatatattgtttaggttgtgttttgtttgattttgaataggatgaccattttgaagactgtgagttcagttttatagccctggaattttctttttttatttttatccttggaggcgcccttgaaattctcttaaacctcttcaatgttgctgtgttgtgttgttgacatattgacctgttaataacgtggtatgaggtttgatgtctgcaattacttggatgcagtccatagcagcataaggctatgagtacgaggttatgaggtggaatgggcttactggagccggtatacatgaaaaggaccagtgttgctcagccacttctccaccgactccacgtgccataacatgatacattgatactgccaggctaagctggaatagctaatatcaaagtgaagaccaatcgattttatgtacgcagttagtaaacggaacatcacagctgaaaatatctttccatcatatatgcagttactcaatggaatattacaaattaaattatcgtcgcgcttagttcctgccatattctgtttgtctggtatgaatttcagttgtacagaaacatctttaaacttaccagaaaaaaaaagaataaatcagatcgtggtcttctcaatgctcgctaagcaatggagctgtaaaaatagtgaaacaactttgtttcagaccttctggtcaagctctgattgtgatgacttctgagttttctcgctgggcaccgagtaaatctgcctctctttgcctcccggttttgacgaagcattcccgtaccaaatcatgccaatcacagcaagcatcatgccaaggactacgtgaaaattaaggccctcttttccaaagaaaagaaaacccaaggtcaatacaagaatcgtcttcatatggcctagaacttgaaatgagacagctgtgaatcttccaatgcatatgaactggcttagattggtcccaacagcaattgtgcacgacaatacaatgaagaactggaaattaagtgagtgaagaagaaagcattagtcccagtttgctcatgtaaggaatatgtaaaagtcaagggaacatcaggtctgcactgctatgataaaaaaccatacatgtcatgctcattccataaaattttattcatagatagaagaaacagtgtaggcaactaggtatctcttaatctccatgaagtatatataagaagcaaaattgctattgtgcaacaaagaactattcatatacttctgtactatttgaaggagggaccatactgtaaaaacacatttcaagtttcaactgtaatgtgcaaggtagcttactaactactagcagttaggtggttgatccattatagagaggtaatgaacatgcacaaaagggattgaaaagaatcactgccagtactctaatatctaataacacttggataatacaatgttcaaaaaaaatatctttaaagctgctgtaaacttatatcaaaacagaacttaaaatattcctttccagcctaaatcgtaattcatggaccaaatccaggagataaatctggtggttacaggatatggtaaactcttcatggtcatcagtatctaactcaaaacggattcatctacagctatgtacagtttataatgccgaaatagctgcatagagccaaatgggactgtaatgcaacaagttcacaagagaataagcagagaactgattcaaaacaagaatcacataccgtaactattgttgtgtaattgaaagtatcaactcttctattggtcagccagaagtccacaaaaggccccagtattaacagggatgctgcctgagctggagcagtatgacccaataggttgaatgagccaagcgagtacttcttttgaaggtgatgaacgtactgcagcatgaaagaaaaataactggaataaaacaagtgctaattatccaaaacctcaccattaaaagtgaaaacagcagcgagggacaaaatttctgttagcagataaatgagtaagactaaatatttgcaactcttttagatacaagttactattgaacatttcctttgaacatgagtaatcagtacagcagttagaagcaagcaaatatcgacagaaatccagattacagaatgagataaatcagactgaattcacacgaacagtttggaaaatatgtaaatgtaatgtaccatatgcgacgtaatttgaactgaaactgctcattcagaagccaaggtatttaaaaaggagccaaacagagcagttatcactagggcatggaatacgtcaaaatgtgcacaatcaaatactcacatgctgctgtagtgctgtgctccaaactgcaattacagctgctagcagcccttttgaattcacactaacatcagtcacagtacatacagcaactcctactaaaacaagcactatactgagttttgtattccttgagtaacggactttgtcaaacaggatttccagaatgcacaagactggaataatacacaacttggcaatctgaagaggcatgaaacgaaaattagtatgtgccctccattctaacattgaatatagaaggatttaaaattactcttcccacctgatagaatccaacagagttccacatcaaactaacattcatcccaacaattgataagtttgcaaaaaagacgaatttaacgagttctggcaatggtaaataggatggctgaatatgtcccaaccatttcattactaatgtcatcaaggttgtggttgcaaaatgcaatccagtcaatgttgtagctgcacaaacacacaatggaacacatcattagcacaaaaaatctgactggtttgctgcacaacgatagttcggtttagtccaactatccataagacgtgcggacaaggcattcttgacaattcaaccacgagtgaggaattatagcatgtcttaccaaaactaaaaccatgtgtggccattaatgccttgttgaccatgatgataccaactgatgtcacaacgttgaacatccatgctccagcatccagcactgcttttctctctgctttgtttgctggtgccatactttcttatcatgtagagtacaatccgatctgaagcatcagaaactactagttcaatacaagatgcggtcaattagtttagatataaataagaggtccatcaacaagctactagtaccaaaataaaccagagctccaaatctaatttttgtatgggaggtaattctagaagcacagatactcagcaagtacaaatcagaaaaacataagtagaattccagactgaataaacaatccaagcatcagaaaacatgtactacacaagttgaacacatgggggcacatgtcacaccagtacaaatcagaatcaacaattatctgcaacagttcatatccttccaccagatctaccgctttgtataaaaatacaacggcactgacataactaggacagtcgcggtagtctctacccgacgtgaaatcccaacaaccttgccctgcacactcacactcccagttcagaaccgagtggaacaaccccgagcggagagaacaccccaccctctccgaaatccgatgccggagatcagcgcagtacgcggaactcggattccgcggaggcagcggatgcgcggatggaatggaaggaatcctccccatcggcggaggaggggaggagaggagaggagaggagacgggagagagctatggcttcgatacctcctcttctccgcagcgggccgcgtcgggcgatggaatggatgggccccttctcttcctcctcctcctcccgtctcatcttctccgtcctcacgcgccatcacgcgtacgcgcaggggggaaaaagtcgggtcgcgtcgcatcgcgcgtggccgcaagcgcgagtgcgtgcgcaccgagccaccgaggtgttgtggtggtggcctggtgcggtggtgggcagcggcgccgcccatgcggctcggctcgacttgggcttccgccgtgggatgggatcccaaccgaattgggcccacggtgaaactaggtgactagcccaactcaaacccagccatccaggcatccccgaacgctgcatatgctgctgcaggcgcggccacccgccgggcggtctgccgtctcgcttccgcgacgacgtggccttcgccgtcgacggtgttgggtgtaatcccacatcgataattgacgatagagaaacacgacttaaaagataggaatgatgctcatccatcagactagtcttttgggttgtataggcctagaatctaaagttataactccggttggacctgtggtggaacagatctaatgtgactgtgacctaggtgacccatggttgatgggtcaggatgcgcactttaacttgaaaacgtgtcggggaaatcacgatgttgtgatcttgctgtgtctacgcagtggcggagtcagcatggggggaggggagggttctttcgaccccactacccaatccatatatctattgaagggggttaaaaaccactacccaatccatatatctattgaagggggctaaaatagacttttgtctgatttttagaagacccaaaaacccaaaagactgagggcctgttcactttgatgccattttcaaccttaccaaatttttgtaaagttgcaaaaaaaatggctatatttagtttgctgctaaattttgataactatataagaaatcctaccaaaattttggtaactctgcaaaaattttggcaaatgctaaattttggtaaggtttttttttggcaacaaagtgaacaggccctgagaagcctccactataattttatcctgtctccgccactgtgtctaggtaggatttatttcgctggacagctttttttcaacgaagcagagtagtaaatttttctctcaacttttttttttgagggaaatttctctcaacttttggcgactggtccatccaccggacaacagtttgatgaaaagcactgttatttagtggacgatattaattaggcagaagctcaattagggtgcaaaactgacggtgattgatccatgacagacagcctaaccggctaacccccacccttcttgacattgcaaagaccacgcaaccacgtcgagagaaatctgctagaggaatggctgtgcaacacacataacttgtgtgacacaggacaccatctgaaacgagtgtcaccatttccgaaaacaaaagaaaacgcccgcaagattgttgagcctgaagttctgaacacgacaaatcttttcttcttttttttctaaatggagaaatgctacacaattggtgttcctgaatgattgtgattatggaataactaatgactgctatactttatttaatcgctaagcatggaagtatggaacacaacatttatttcggatgtaatgtaagcatagagcataaacatgcgttggtctaattcttcccattacgtacctttcatttgcaaatcaccaccaaatccttatcttagtagggttttgcagtgtcgatttgatcgctcatcagccaatgtcctgtgtgcgaaaaatactacttgctcacagtctactactactactacaccaaggctcaagaaggggtttggtgctgagtttacttcacatgacccaccactgggtgaggtatgtctgcactactgcatattgtgctttcgctccattcccagatgttacatcttagcttcccaccgatgcaatcttccaactgatgataaatgcaggatagctttgccctttttcaagcaggttgtgcatcctacgtcactgtctaattccatacagtatctagtaactagttcatccggtgctcgaactgtactatatggtatagatggttttctggaccaacgtgatgacccttttcattgaaaccgtattctatatgtgcgtacctaatctatagaaaactggtaagaatgtattgtgatgcacatttctgtcatgctaggacgacgatagtgtatgacttgcttcacttccctagcagcgtgataaactgacgtcatgtgatttatggtgcagtgatttggtctaaaacctcaaaagctgacagaatcattttaccgaattgtgttcattagcttaacaccacgcataaggtggcacatcaatcccctatatggctaggtagttcagattgctcttctcaggcctaagaataactgcacaagattttctgaaagcaaaattacacgcattgtgacattttacgaacccatatgcaccagtcatactcatcttggttgaaacagtttctgcatcatgagcaaacatattgcagacagaccgaattcagaattcaaatgacaaaacacaactaatgtaaggtttttaaaattagctgcaaacccatgtaatcctgcatcccggtagaatgtcaagagagtgggacatcattcttgagctggaagtggagcaggaagaaaaaccacttccagtgggggcttgtgtgtgtttcggttcggacacagaactcaacagcccaaccgctccagttgagtttgacagaatgctggaaccaccaaacttcccttggttgccttcttcatcttcttcttcctcccctttcccgcgaaagggccactcccgctgcatcctcgacgcctacccagctatcctcatctcctcctccattaaactccagccctcgccccctttttaaatccaccgaccaaacttcctgaaccttgccaacagtacagaggcctcgcttgttcatcttcgtctcggctctgcctgaaccttagcgccatggacggcagtggtgtgcgccggatttaagctttgtttaggctgatgggtcttcatgcttcggttcatcttcgtctcggctctggagttcttgtaaggtatggtaaccatgtttcggttttgcaatgaatatgttcattagctgcttctgttgatgaaatttgctgggttagtcatatgtattctgcacttactagatatgtgcagtataatggcaaggttaattctcttagtatttaggaatcatataatatgatttgctcggtataataagttttcacttggacccaatttcgatataatgatattaatcctgcaatacaatgagctatacacttaatccttagagaccttggggagatactagaaggtaccatttttttttctttttaataaaatttagtacctcctagtcaaatacagcaagaccattctaatccttaatacttggaggcaaaaaaaattatgttcatatttgtggtttgttttcataacgcaaactgataaaattgtatccaaagctcaaatgtctgaggttaaattgatgaactgataagcaattgagatgttgagtttcatctagcaaccaacaaccactaatcatggttgctttagaaattagaataccagagaaagaaaactcctttagaagagcttgacactagagtcatgtcagctttagaaattagaatactagagaaagaaaactcttttaaaactctttttataaattacaaaacccacttagaatgaggcatgtcatctttctaggattagtgtcatctactcatcttggtacaaactgattgtgtatatttgtatgttctgtacttgtgtatggatattgtcgcaacaccctacgtctgcactatgctcaactaataagctactagtgtaaccaaatacattgtagttcactctgagttacaactttttcgaaagaatgctatgtgcataagatgattcagagactaggatacttattccatgatctaaaaaagatactccctccgtttcacaacgtaagtcattctaacatttctcacatttatattgaagttaatgaatctagacatatataacttcaatatgaatgtataaaatgctaaaatgacttacattgtaaaacggatgaagtaattttaatatttaagacttgaatgctccatcatttgcttttcagctcatcaaccgcggccaaaatttaaattaaaaaacttaaattcagagttgttttttatgttttatcgtagttatattggcttttaaatcacgaggaacacgtttaaaaaatttacacataaattattgttttcactaataagtgttacggtttataatcagcagtggacgaaacgatgaaacttgaagtgaagaactgaagatcctgttgagttggtggttggtacatttcaagtgaagaactgaagaatcgtagagggaacaatgtcggagatggaaggagctctgagatcctgcatggagcagctgctcatcgccagggaggagcgggagcagatcatcgtggaggcggccagcgagatctcctcggagaagaagaaagcgcgggagctccagcggaagctcgacgccgcgaccaagaaggccgcgaagctcgccgccgagaacagcagcctcgccaaggccctcgacgccaaggacgcggcgatcggcgagctgagggagtccaagtcggcctccgacggcgagctcgccggcgcgagggcgaggctggacgcggcgcagaagcaggcggcgtcgctgcagtacgaggtgcggatgctgcagaaggagctggagatcaggggccaggagcgggagtacgacctccagtccgtcgacgcgtcgcgccggcagcaggcggagagccagaagaagatcgcgctgctggagggcgagtgccagcggctgcgcgccatggtgcggaagcgcctcccgggccccgccgccatcgccaagatgagggacgaggtggaccagccggcgacacccagaaggtcgcgctccgtggcgccgatgtcgccgcggtccgtggcgccggcggcgccgatgacacccatgtcgacgtcggcgcggccgatgactcccaccatgtcagcgcggccaatgacgcccatgtcggcgcggccgatgacgccgcgccgtgccgccgcggcggagcacgagacgcccgcggcggcggccaagctgcgcgccgtcgaggacgagaacaaggcgctgaagcagacgctggcgaagagggacgccgagctgcagttcgtgcagatgaagtacgccgacgaggcgtgcaagctctccgtgctgcagcggcagctcagcgagctgaccgaggagaacaagcagctgagcgacgcccatggccagacggagtcgtgggcctccgcgctgatctccgagctggagcagttcagggccgcgaagctgcagggagcagcagcatctgagatgagcttgctcgacgatttcgccgagatcgagaggttggagatggcttcaggtggccaaggattgagatcgcccaagaatgcgcattcggaagcgatttcttcagagaagaatgataaagacactgtcctagaaaatggtatctctatctccaatggccagcctgaatgggttcaggatatgtgcaagcttgtgatgcagaagcatgaaaccagtggggaaaacattgacacaattcttgaggagataactcgtgcattggatcagagtgctaataatcagaaaggagatgatttgaatggatcatatgactggagcataatgaaggaaatggtgttcagcctgactgaaaagatcacctctgttattggcatatctgaagaaggcaatgttgcaagttctcaaaaattgctgcttgacaggtctgaattttgtgctcgccttgagcatttggtccatgtctgtcatgatctactgcatggtaaaactgaccttgaaaagtttgtgcatgaggtttgtttggttctagagtatataatcaaccagtacaagaatatatcattccaagaacaaccagacactgtgaataataatacagagaatttggatggagaggaatcatttggtaacatgaatggtggatgtgacataaaaagtccgaaatcatcatctgctccagacatacaaactgaagcactggaagaatcaattcagtcggtagaaggccgaaaaacagatcatattttggttaaccaagaagagagtcaacttgatgaagaactcacaagagttatactagaccaggacgagaaaatcagtcaggagaactcagcatcctgtgagatagaaaggtaactaacactgaacacatttaataataatctgttcatgtgcaattaagttagatgagaatggtgaaaaattgtgttaccctttaaattactgagaaattaagttactgcaattaagttagagtaccaattttactgctactgagaaattgtgtcccatcatgccgtttttttaaatgcagcccccatgatcatccaagtgctgaaaccctggcagagaaagaggaaaagcatttagcatcagtaagtttctctgttgctcctataattttcagtaatcatatgcatatcaatcatataggtatctggtatgcttttttcaccattctcatccatacataatacgttcgtcagaacttaatcacaaaatttgagcttatgcagagttcagagatatcagcagcggctgagaagcttgcagagtgtcaggaaaccatcacaaatctaagcaggcagctgcgagctctcaagagtccggcggtttcaggcaatctagacagcccaatgtccaactccagaccaagctcatctgactacaagccccagtcacttgcatgcattcttgctgaaggggaggactccagcactgaggatgccatttctcctgcaaccaaagaggtgcactccaagaaagagcctgatgctgcatcacggaaaagcgtagcacaagatggtagtgttaatgctgccctcaaagctgtcgaagaggaattaacacaaaccgttgttcatccgatcttcccagagccatcccaagagattatttctgctgatctcaagaagaagagacggagccccagcttgctgggcaggataatgttcagaaagaaagtggaaggcagctaggtcatgctgctgatctggtggatgcactgtgctggtaaaagcttgcaaaatctagtagcgctccaccactatgctgtcactggagatttcgactttgaacgaacgagcttgttctgtttgttgagcattcctgttccttagggtgcaacctttttggacacgtattctgtcacagagactgatgacttgtggtaagagactctgagcacatgatctgtatcggttttccttgacatggacaaattttctttttgtatttatggcctccatggttgtgtaaatgttaatttaataagttaaaaatttgttcttgttcactggaatacgtacatgcaattctttttttctgtctgagcggctccaagtttcaagacctctctatactgtttggaaaaatccatacaccgacatgagattacaggtacagaagtagagattttggaaaaaaaaaatatatcacaaattcacaaataaaaagcattggagatggattgcttctgaattctgatactgcagaggcagatatccattgtgccttttgaaaccacaatagcgatctactgttagttgccccgtagttgtagccatttgaatgcaaaagcatttcaagattcttttaggtagggtgaggtcgccaccagtactcatcccaagaaggattctctcatcacagggatgtgaccttctgactttgcatagtatactactactatatttactttataaacagctgaaaaataccaatcatgctttcctttcaaataaataaaaaatcatgccggtgattgtcgtaatcatttacgaggtgtacagtacatcaccggcccagctgatctcaacagaaagaagcacaattggcgtaggcctcatcatctagaagcaatacgtcaaaacttatcccgagtcagcagcacaaaggatggccatattcagatattctaaaggcggccgtgacaggatagaaggcaacaccatcaagccactggggtttccagacgctgaccgatcccaaaaacaaacaaaagtctgaagcactaatatacttgcgtcaaatacaaaagaacggcatcactgcgtctgcatgctactgacaattttctcaaggctttatattcctcgagtcatttgcgttgcagttgcagacacctggatgcagttctgctccaataattagattatcattcaggttgcagacaggaactcatccaggcccggtgatgcctgggacggcaagagcttgtctttttctttcattttttttgtgttatttttctgctgctgatagactgatgatggcaattgtttgtcacttgtcagtcatgtactctgccttgtaccttttgttgctggatagcgttattcggcaacgtagccatgttatcgtgtcttatcctgtaatacatccgtcccaaaatatagctatttctagcacagtactttgttctaaaataaagctatttttctacctaccttctcctctcaaccaatcacaactattctttttttacctattttctcttttcaaccaatcacacaccttcttcaatcattctcatctactttcttaataccgtgccaacctcaaaaatacttacattttaggacggaggaagtaggctttctttgggttgtaatgcaggccaaatggcaacttgtagaatggtttcagatccttcacgccgcgtttggtttctgaaggggactgagatttcgtctccttcccatttggttatagttatctgtttatcaccacaagtttactgtttgcttgtgttcttggtccaattcagactgctgcagtgctgctttcttgacctgcagctcatccaaattccatgtatacttttcttgccatggttatcctttgtaacactaaactgtttctgcgcctgcgttgaaagttgatctgcgtgtgacgcgttcatgtattgtaccttaaacttcatcacaaacttgtttcactaatttgtcaaagttttgctttttgcaagtttgcaaccgtaggaactgatagtacaaatgatcaaggacagaagaagatgccattctcagccatgcaattttgtacttcaacaactgagtcttttatttttttgaaattgaagctcttccccgatccttttctcatctttattccagattatagttacagaatctacctccaggctccagccctacatctttacaccccaaagaaaaagcaaaaagaatgaaaggggagaaaaaaaaaaagaagaacgaatcagaagctctgttctcaaaaaaaataaataaatcagaagctcactatataagacaaccttttccatccttttaatcttttgacctttttacatgtttacatctaggtaacaacatctagaagatacaaacatccatggaaaactgcagccgcgatgtcctaactcctaagcatattgtcagaatcagccattaactgctgctaattcctgtttgacaagtgagccacctgtccctctcatcattgcttatgtcagtctcgtaatgagatctcgaacaggtcggagtcggcgtccgggtcgccggccgacgcgccgccgccgccgccgttctccttcctgctcttgctcatccgcgacgccgtctccagccagccggagtcgacgcggcccatggagaagaggtcgccgctgtcgtcgaagtcgaggcccagcgaaccgccgctccggccgtcgtcccccgccgacgcggcgcggaggaagcacgggttcgccgtgcgccgcgcgttcgccggcgcgtaccggaacttgccctgcccgaggttgaccagcgccatcacgtcgaagctggaggcgaggaccgggtacatcggggtggagaacgcgtcggcgttgcagctcacggcgtggaccagctgcccgtccaccgtgaagaacaccttccgcttcgccggctcgaagccgcagcccaccaccttgtccacccccgcccacgacgacttctccgactcgtacaccagcttcatccctgccatcaaaatccgcagaattttcagctcaagatttccacggttgcaacgcgagaaagagaattcttgttaccgtcgaggtagaccgcgccgttggagtggaagccgatggacgacgcgtacgttccggccagcgacggccgtggcggcgcggcggacgcggcggtggcgaggccgaacgacatgaccgtgtgccgctgcttgtcgtggtgatcgtcgactttcgtggcggctctggtttcttggaccgcgttcttggcgtccggtgcaaagctgatgagcttggcgcggtcgctctcgctggagccgtccctgccgcggcggctcgccctcgacgccgaccactccggccgccgcgtgttgaggtagatgatggtgatctcgaagtaggcgtcctgcgggaacggcgcgccggcgaggggcgggccgggcagcggcaggctcatcctggcgaggcacagggcgctgctgttccccgccgcatcgtggtcgccgccgcggagcgggctcgggatgctcccggggagccacttcttggtggacgccgagacggccgccgccgccgcggccaccaccgggttgagccgcaccgcctgcatccgctccgacgaccccgcgggcacctcccacgcggtgtccgccatgtcgcggctggtcccggagtcgcaggcggggcagagcccccacagcggcgacgacgacgccgacctcgtccgcggcggcgccacggcgaacacgaactgcgcccacccgttctccgccgcctccgtcaccagccgcgggtggtccgcccactggaacggcccctgctgcgcgccgccggcgccggcgccgccccggtgatgatgcctcacatcgacatgcccatggtggtgatggtgcaactgctggaaccggagccccgcgcggccactcgtggcgttgtacctgatattcagcttccccaacccggggctcaccgccggatcccctcctccaccaccaccagccacactctccggcagctcaggctgcgcgttccgcgacgacgagctccgccgccggtaaacaagaacagccaccgcgaccagcgccgcgaccggcaggaacacggacaagaacagcttcagccacagcgccatactctcctaattaacctcctcgcacctctcactctcacaccactctactcgatcaaatcatcctgcgccaccggagctgagtcggcgaggtggggcgaggtcatggacatggtggtcgtgcctggactgattcgtgtgacctgttgagttgtcgtgggggtttggtttggtgagtggtctaggaaggcaggcgcggcaagggaggaggctgactggctcaacggaagcaggcgaggaggaggaggaacgggagggcggttggagatggaaaggtttttaagccgcgggaaagcggggtgcatttttggggtgatttctctgtgggtgggtagcccgtagccgacgggaggagggctaatctgcaacgggtacatgggcacgtcatagggttgttaggttagtgacgtgatgtgagaacgccttatgttaataacacaggcgaaagtgttccgcaccaaatctctgtttcctgagtatgaacacttttcgggctccaaatggagaaatgtttttgcgttccattggctttatagcactcaataattaattaaacatttgttagcatacagttgtgagactaaacatttatcaataagcgtagcatatatatatccacgattctatgatagagacgccaattgtagtaaaccagtaaatttagtacatatttgtatttttaattttaatatagtcgtctttgtcattgtgttgttcttaaaccatcgactcgttcaactagatatattggctaaataataacaccttcacacttttacgcccccacattttttgttgttagtatattacttctgtgaaaaaaaaatgaaatgcattgaaattttgtttcggcatataaaagttaatgatcagtataaccttgaatacgacgattataatctttttagactaacgagattgattgataggacaagcctaagtgttttaagacaatggataaattggtcattgctttaatagaaactacaactacttattacaagctaaacataagagccttactgaatgaatgattgaatgaatgcaaaaatttaattttgaacggaacattttgttgtggataagctagtagtgtgtccttctctcacttagtgaatgtggctcacaactttgatataaaatgcattcccagaattatgtatgaatatatgatacatttttttagaactaatatatgatacttggagtagtctagtagatgcagcactgctctcaacgaaatgtcactatgtggtatttgtgacaataagttgtagttggttagttactatcactttcccaatcactatgataaactacatgacgttaccaaatacgtgtaatgatgaaagtataagtacacaattggtagttttcgctcacatctcttattttaaataaaataaacaattgaaacgctctagtcactcacatatcttattttaagataaataaacatatcaacatgcactagtcatccgcataccagctcatctgtactccctcccatatttgattttaaatatatgtttgacaattcattttacttaaaaattataaaaacattacttgttttgttgcgacttttaccattaaaggtgctctaaacatgtcttatgttttatactaaatttttaataaacgaacgatggaaacatgaataaaagtaaataatgtcatatatttaaaaatagatgtaatattattttgctgatttcaccaatgtgaaaaaaaaactgtccctaagaatcggtcaagttatgtaatttgtgtaacctcccccctccctacaaaagaaactgatggatgttggcagtacttcttttcagctgaaaatttttcaaaaaaaaaaaacttaagcgcgtaattaatctgcataacgcatccgttaacccttttttctttgcaaaagcttcagctctgacctcactcctcactaagccatccccttgcagtttaatttggaggtacaaaacgccggtggacgtaagccggatggcacgcgagaacagacgtcagatatataccaaatcctatgaaaagtaatatgttctttctccgatgcgtcggtgtcgcggcaaacgtcagatgcccgcatgatcatccccggccgttctgttcacgatttcttccacttttttctattccaacggctcgctaatctctctctctctctctcgttgatagcaatcaacagcacgtgatttggaaggggctcacacgtggggaagcatcgatctgggacggtgtcatcaggcgagagtcatatcctgttcggtctgtgcaggaacgagttgaatttggtgcttagtatctgtcttaatcatggagctatgcatcttttgtcagctcaacttgggtgcttatttttagtcccatcatgaaagtgtattactactagtttcttgttatggacagcttgtcctacttttaaatccatctcggctcaaacagagaatattggctttggacataaccttgatttgggccttgcaaagggaatgcatttcgattggaccaatataactcagtgaagcaattgactaggacggtacaggcccaaagacgaggtggaaacagtacaaaaggcatcaaaatgcctgtgtccacttgcttggagactggagagtgctttaacctgagaattcttttttgtgtgtggagaaaaacctgatattatgtaaatggatattacctagggtaagcctctcatttgcatattcattcagattcaaagccaacaaactagaaagatagaatagaatgatagaactccagctcctcgttgggttcacgactctacccacccgctagagaactctagttcaagtcctggtgtcgataattatgaccgtgtgcatctgtgattagtgtagatgctggaatgtatagaaaaaaatcttattaaattcaactagcattgtggcctgcgcagattgcgcgactaacatcattatattttctctcatataatagcatatatgttttctcattatattatttaaatatattaaaatgacaacataattttaaattttaatatgtaatgttcctattgtattttatatacgtgttagttatgaattatttttaatatcaaattttagttatttgtaaattatatatattcctatatagactctagactcatcttttaatatatctttttaattttgaatttttattatttctaattgaatttctatgtggactctaaacttatctttcaatattctttaatttttaatttcaaattttaattacttctaaattgtattcctatactgactttaaactcttcttccgatgtttttcttaattttgaattttagttatttataaattgtatttttatacgaatcaaaacactacttttaattttattatgtttattccgaatttttgttagatttaaattcctatatggactctatactctacttctaatattccttattttttaattccgaatttctattttttttcttaattgtatttctatataaatctatactctacttctaatattctttatttttaattccgaatttctattttttttcttaattgtatttctatatggactttatactctacttctaatattccttatttttaattccaaatttcagttatttcctaattgtatttctatatggactctagtttcctctctaatattccttattttttaattccaaattttaacgatttctaaattgtatttctatatagactctagtctcctcttctaatattccttatcttttaattccgaatttcaactgtttctaaattgtatttctatatagattagtcgattagtcgagctgttttaataatataatagatagatagatatatagataggcattgctgcattcttcactccttgatctaggaagtagcttagaaacaaaagagaacaaaaaccttgaagagaattttctgaaaacatcaagggcgtactggccccagcccaggttgcttcggcccagccctggacatggtggctccttatcggcttctttcttgggccatgtatatggcgtcagaactcagaagtcgattccgcaacaggaagaactcatccctctggttcctcttcccgcacacaaatttcccgtcgcccgggtgcaaaatcccatagctggcggggcaaaattcacacttcgtcttgtagccgtgcggtttactcttatctgttgatagagtaggaaaacagaagtcataaattaggatccttgttatgagagtaaaatcattagcagctgacatcagagagtcggcatagcagagagtgacataaattaggcaccaaaccaacacacgataaatgcagtttatgaaattcaataaatccgtaacatgagccgtgacttaccgatgatggtgcaggtcacaacggtcgcagagtcgtagtcgtcgtagcgtagctcggcgaagaactgcttgtcgggtgactcgggaggagccctgttgcgcttgttgcgggagcgtcgcttgcggcctcttttcacgtcggattcgtcatcatcggcagcagcagctgctgcttcatcggctggcttcaccgggctgctcctcctgcgagccaggaagctgacatgaacccagagcgcgcgtctgaagctgacggacgcataacccagagccttgacaggtcgaactcggcgccctggaaaaatgttgctactatgtcagtaacatggtttcgtttaagtacattgctaatcatcggttttgcatccatacatattcagttgttactgcagttatgtacgtagtgaggtgcttacaggattgttagcgttgtagtgatggagagcgcggttgacatggtcgacgatcaaggagagttcagcttgcctgcaattgcaagtgcggaattattgttaccgctacatatactcctcatcttaagaaaatgaagaaatatgcttccttccaaaaaaaaccctatcactgctcgatgcacttatattgttaaattcaaaaacaaaacgcaattcgaaaaagtatccaacaagaaattagtccagcaacgagagtaattctaaattttacgcaacctttcgtgttggttgtaaggacatttttttttcgttctcgtctgtgttcttttattggcctagggtggtcggtcacgcttagcagcggccgatccagtgctagccttctcccagatatgtgtgtttgcgctgtcgatatgtggatggtggtatatatttttttctttttcctggttatgaccttccagtattgtaatcttgtattttttttctgctctatcaatagaacttcgcaccgtctcgtgcgagttgttaaaagaaaaaaattacgcaaccttagatattatggtctaattaagttgtacaaaatcacaaaggttttggcatgtatcacataaccctgggttggtattatgggctataaagtttcacgaaactaaactatttatcattttaactttgatcggagaaacacctaggggtttttcggctagctccacaaggtggtgggctaaacgacctgggttcgaagctttaccccttctaattatttgatattaggccctttcctaatatttattttaactttgatctactacacgtttgaggtctacaatcaacaatcacatatcaaatttatgagtttttttatctgttgtatataaatgttacatccatataagtaaagcttcttaaaattgtgatataaaagtatgtcaaatttgttaatgatgtggttgtgtcaaaatttatatagttttgtgagactacaatagattgggttttataaaatctattctctctctctctctctctctcttaaaaaaagttcttttctatgaccattatgctgtggcacacaacaatatatcgtgagaggatttttttttaatggaatcgtgagaggaattgcaagttcaattttccaaacggccccggcccgagccaaaccgcttgagatctaaacaatcaatcaacatagggaaaacttgcagatcgatcgtgacgagctagctgtagacgatgatcaatggaggcgcaaacatggcatgagaattgagatcgaagacgtaccgccgttcagggcatgggaccccgcctcccctgcagcgacgaatgtcgcagccgcagcggcgcagccgttccaccgcctcgtcgatcaaacgctgccgccgtactagctccccgcgcgacaggttgaatagaaagggcagcctcgtcgtcgtcgtcggcggcggcggcggatcagcgtcctcctctctcgcttgttgggatcccatgtcgctgtgatccagccaagatctaatgttttacaagaaattctcaaaaaaaaaaaaagagaaaagctttacaagggaggctaaagtaaattcggcccatttaagtgttcaggcccatttaagacttttaggtgctgacgtgggctgcgcgtcgtgacccaatggaacgggctggcttgcaactccgtctcctcgcgcttcctcccgacggcgtcccgtcctggatgccccgaggtggccgttcgccattgacaggagtacgaggagctacgtgcatgggggtgagtatgtcgatcgttgtttccgaggagattggatatcgtcggagtaagtactccttccaatcttcttctttttctctctttttttcttcccgaaagaaacatgctttggatctctagttactttcttgatttcatcggatcaaatttggattctgttgaataaacacaaggcgaataggtttctctaaacgatcgatcgatgcacgaagcttcagattcagagtgggcgggcaatccggtcaataggttggtacaggttcagacttcagatttcttaccagcgaacagtgggctggttggaggcttgcagcaagctcaatcagccggtgagtccgtgactccgtgttggtgacttggacgaaagaagatgttcgacctcaagcatgccgctgtcgatagccgacatggcacggggagctcgctccacagccgcaggcgagaagataagaagcccaatttgcatggatgattaaggtaataaatagcgtttatagcgcccgtaatagcggccactatatagctgtagcggacctctaccgctacagggtagtggactgcaaatagcgtattggaacttaacggccgttatagcgcttcgcggccgctatagcggcccactattgactttattagatcgctattaaacgtgtagtctaaattttaaactttaactaaaacttgatgttaatattgatatacagttatttttcttaattttgctcttggaacttagcatccgcaatagcacctactatccgcaattcgctattcaaacactaatccactaccaacccgctatacgctatttattatcttgtggatgatgcatccttgagctttcccttcccgaattccagttccagctactgagcaagataagtcagcatgtcatttatcaagacggcaacagggagaagaggacgtatattgtactggacttccggggacgtacgacgaatgttaagatgcctcaacatctcgtcctttgtcctgtatgactggatttgtatgtcagctatcagcataagcggtcaatccacggcacggcgatttgagaaacgaagcacgcggatgtaatgcaatgttattttcgaagtgtttttaaacccttggccatggggcctggcacaaccacacacgagaaaagactcgtatatactctattttaggaggcaaatctccgggggggaagaaaatctgccatctagcttgatcgctccaagaaaggtaattagtttttttaacctttacttacggtgcttaaaaaaagttttctaaacataatttcttatacatctattatgagctatggaatgattacaattatgaaacatgtcaggattaatttttcgttgttccgatgtgccttgcacgggcaccattctatgcctgattttcaaacatatgactttttttattgtttgatttgcatttttaaaatattgttgtagcgttaggacatgcatattactagtatatatatattggagaaacaacttttactgtgatatttatggatattataatcaatctaaattttccatattttctcattcaatggaatatgtcaatttatcctatcaccttaatcagtagtacaagagtataaatgtctaatcaagagatcaatggattaggtcgtttccgctggtagaagaacaaccttgcagagactatttatgttcatgagaatgtttttggcttatccttttcaggtcataacagagataccaagcccttacataacaaaacataccatggttgttccatcggcattgctgctgccgctgccgctgctattgctgtgttacggatttggaaacatccattgctcaccagttcataggagcagcatcgatctccactcgctgctcgacttcaagcagggcatctctagtgatccaaatgaagccttgaagtcctggaacaccagcacccactactgtaagtggacgggcgtcatgtgcacccaaacgcgaccatggcgcgtctcagggcttaacctcactggtctaagcttgggtggccaaattagctcctctctcggaaacctgaccttccttaattatctggacctctcctataataatttctttggcccgttgcctcttcttaaccggctccaacaactgaaaaaccttatcctaggaagcaacagtttgcacggggctattccagtctcacttacaaattcttccagcttgtcatacctggacctctccacaaaccttctagttggtgcgattcctgcgaacataagcttactttcgaacctagagtatttggatcttgatcagaacaatctcaccgggaccgtcctgcaaaccataggagacattacgtcattagaaatactttatctttttcaaaatcaactaagtggaagcattcccgataagatttggcaattgccgaatcttatgcaattggtgctcggtgaaaataatttgtcaggtggaataccacaaaccctccataatatatcttctctacaaagattaggtttggagtacaatatgctaagcaaagcattgccacctaacattggtgatgccctctccaatctcgaagtacttgggtaacaatatgtttgaaggtcaaattccagcttctttaggtaatgcttcagggctacaaataataatgttcttaaacaatgcattcgttgggaaaattcctcctttgggaaagctttccaacctaaatttcttagacctagggagtaacaggcttgaagcaagtgacagtgatagctgggaattcttacatgcactagggaactgtagttatctacaagatttctcactatcacaaaatcagctagaaggacatataccagattcaattggcaacctatcatccaatcttcagagtctcgtatttagtgcaaacaaactatctggcatagttcctctgagtatagggaaccttcaaaacttaacctggctagggctagatttcaacaatctgactggtccaattgacgagtggattgggaagctaacacaactcgtacatttaaatcttggtgagaacgactttattgggccaatccctccatctattggcaatctcaaccaattagcaacactctttctaggagcaaatggattcacgggttacataccgcctagcttgggaaaccttcagtacctagtcaaattggatgttagtttcaataatctccatggtagcatatatacataaggagttattcatcagtgtagcaacaatgatagtatgtgcattgacccataacgatttagatggtaatcttcgacaactctcagagctacacctttcatctaacggggcatattcccgacagtttgggggcaatttcagagatagaaacaattcgcacggaccataactttctcacaggtaaaattccgatatcgttgagcaacatgaagagcttgagcattctcaacctttcccacaacaatttgtcgggtaccatccatatggccatagataatctacaagttctcacccatttctcacccagttagacctatcggacaacaacctcaaaggagaagtaccaactaatggggtattaaaaaattctacggcaataccactcaacggcaattgtacctctgtggaggattgccagatctgcatatgcccccttgctatactgatttccagagaaaacaaatacaataccacttggtcagagtattgatcccagtatttggcatcatatcagttttattgttgtttcactttttactcatagagaggaagatttcaagtggaaaatatttattgcggctctcttttggcaaacatttatctaaagtttatgttgatggaaaatctgacgcaacacatgaaggtctgagagatctgcttaattctaatgctggtcctaaaatcaggtccagaacgtgccagttagtgtgatcctacgactaacaagatagataaattaaatcacaaggccgatcggccaaggggccgatgtgaaatcgtgcgtccagctaatgctgatggaattcggatcaatggctatgtagctgatgggactttagatatgtaatataaaacaaactataatatcatcggctgagactaaataaaatataattgttaataatcctttctttaataaagacaatcttgatagatcgtgctaaaccgagataatataagattgaaactaataatgatagacttaaataaatgtttatatgatgttgaatattagctatgaagtgattcaatcaatagtaacttagataactcattggctgaaaactccgatgaaaccttagacaaaatctatcaatcttttttcgttttccgcttcccctattgttcttatcaattcctcttcctccttccttatttccaaatatattaacgaatcaagatccaataaatcagacctaaccgagatagtacgagattaatgacaagtttaatagatctaaataagctgatagactctgtataaagtgattgatatattgaatctaaccaagatagcaaagcaatccagaaacgagccaatatatcagataagaaacgcaattaagaacttaattagaatattggacttaaccgagaaagtactaattacattgatacaagcgaagttgacggaacttatttctcaccggagatcgaaactgatgcaacacagctcgaaactaagaactcgtagaaaactaaattatggtggtgatgcgccgaaagttatatatttatctggtcatagttaccaagactctgggcatacatacttataccctcgggctaaaacgagtctgctcgaacatgattcgactggcttaggattctatctccttaataaaaggaaaattaatacatgtcttacctatagaaataaatctaaaaaaaaatctaactaaccaaacctatcctagattttccaaccgtaccaagccaaatttatagtgtcaacttctccttttgacttgccttgactaacgacaattgtcaaattttgccgttaacagtttcttacaatgatctagctcgagctacatcaggcttcttcgagtaaaacctaataggaagagaaatctatggttcatagttactgacttagttctaagcacgacttagtagatcaaacttaactgatgcatcactaagtatgaaaagaaacataatatctagacaatcaagcctttgattgattttcagggtggtggataccttagttaatctaatctagcaagataatttaaccgataccagtataaaccctaaaatgaatctcagccgatatgatcaaattaagatgctaatctagattaactaagatatatgataaataggtaggtaaatatatcaaccgatccagagtgatccaagagggcgaagtgatgtaaccttgaacaacatcaatgtagctgatacaatctctagggccggcgaaatgtaggacttgccccttcaccggagatcgaactgaaccgatgcagccttgcatcaggtgacaagtttcgccggttgataagtaaaaaccttgaaaaagagggtggcgatgcgccgagagtagttgtattgatctgtgagatagtttacaatgactccatgtgtacatatttatatccatgggtagatactagtccttattggataataaagaaacttttctaagataaaaaggaaaacataaagtccttatcggacactaaacacactctcctaaagataacaagaaactaatggactcttcctaattaatagataaactctgcatcctccttttgaactcggtctcttatggataaatttcctttaattcaattaatttccttaaccgaacccatcaagaatcagactactggcgactgttagtgcccatcggccgatttgtcacaccccaatccggcaccgccatacaacggcacctgacaagagcgtgtcgtaggaaaaacggcgcgaaccgcttcatacgaaaccacgatcttagtaccagtcccaggacatagcgctggtacccacggtgacaaatatgaatcattgcaatccttaaaataaatagaggacttatttaccttaacttaggttgcagctcagaacagcccgagaatgcaaccgatgacacggacaaggaaataccaacaacagcagcagcagcaacggaaccaacggactaacacccaacaccacagacgatagctaggaaccaggacgaaaccctattcttcacttcacttcatcttcagcttcagggcggaggaactatatatatatatttatatagagcaagggtgagtactttcgtactcagcaagccatgggaattaagtgtttaatgcaggcttcaaaggaaaggctgttgtttttgcaattgattttagttaaactcctttttgaaacaactaagtgagtgcttctcaaacgacacagatgagacagtgcgtctcgttcggtcggagtatgtgcaatgtatcagtctttgaatagattcaaggttggcacccggccaacaactttcaaacggccacccgggcctagctgatcccatcagccacagagattttcccaaacatcgaacccattccacaacagcaatttcacaaagtagtaatcaaacaaaactacactaggaatcacctcacgtccgcccatgaccgtgggcacggctgttcgaacaatttaataacctctgcagagggtgtacactttacccacacgacgttactagccttggtcacctaacccgtgcggatcaaacacgtctggtgacttggggctttcacgacaaggcatttcgaaagccgacacaggttcaccatatgccaacgagaggggtcccagaccgacaacaggttaggtcccagaccatactgtgccaggaagcccgagggttctccccggcaccaccccgttgaatccacatgtctcttggcatcatggttctcccgattagcaaattactcagctaggggtgtcccattccacccatgtggtcgcacttgagacttatgttcggatgaaattccaagggaaacggtccttaagtgcaagagcgggaaaccgtactcccggtaggtcccccggtctgtggtattggaaattcatttagtttgcaaacaccaaccctggtgtcgggttttccaagtttttttgtaaaaccccaagttttacccatcattggatattttaaaattgaggggaggtgttccgatgcgcatgcccgaaggcccgtgcatcaaagcacaacagttgacaaaggaggtttaagtgttcaataattcaaggagggtaattgcagcaattaggattggggccggtaggctatctcgcaagccgcggccgaaatactcgtgttaatcctattcatgcaatatttgcggaaaagaaatacttagatttaaattataggtgcaagatgatcaaaggtcacttgccttgctcaaggccttcattgagcttcacgaatcttcaagaaaacccgcgatcgacgaaaatccggtaatcgcaactatacgcaaacaatcgaaaacctaaaaaaaaaaccaaaagaaagatcctatttagactggttaatagtgccattaaatagatctcaattttatggaattactagaagcggaacggagtcaatcggatgagcagctgagaagatattgaattttggaagtttaattggaatttctgggcgaaggaagatatttgtggaacaaggggaaattgatttatgaaatttatagaaataatattctcaagaatattattgaccgtcactgacgtgcgggaccaaaggaaatgatttataaggaaatgattcatggaattttggaataaggaattgatttatggaacaagggaaaaaggatttattgcatttactggattaaggaaatgatttattgaattcatggaaaagaatattcccaagaatattctttaattactcattgacacgtgggaccaacagggggaaagatggacttttgtgtaggggagctgatttgatggagggaagaaatatggactttagctcatgagggatgggcactgggcttagagggagggactgaaagtggactttagaggtcggaccgagggagagggggcacggcccgggtgtggaaggaatggcccacggccgggcgggcgaggccgagccgggccaggcatgcgcgcgggcgggcgctgaccggtcaccgcttgacccggtcaagcgggaccggcgggctgaggtggcatccacatggatgccacggtggcaaggcgagaggggaggaggaggcgcgcccggagatcggacggcacacggcagccgatgggttccggcgagcagcggcgagccggagggggatgcgggcaccggtagatataggaggagatggggaactcattccacggctcggatcgaagagaggaggcgcgacggcgatcggtggcggcggcgaagctcgtcggatcggggatgtggtcgcgcgagggaagggacaagggggcgcgaactcgggcctagccgaaccggtacgcgactgcgatgcgcacgcggtgacgcgggacccgatggtcaccggcgacgcgggacccgatggtcaccggcgacgcacgcgcggcggcgttatgcggcggcggaagcggcgacacagcgcggagacaaaggagaaggccggcggccttggggcagccagggggaggtcaaggggatccccgggagcatggcggcgagaggaatcggcgcgagaggagccgacaactgtggattgcggcggcggcaatcaccggcgagcaaaaggggaaacacgaggagacgacgagggttcgattcaaggggggtgggagcatctccggggttcaaggaatccgtttccggtgtcagatggggcagagcggcgccgtggtggcgcggcgacgggaggcggcctcagggagcggtcggcaatggcggcgaggccatgccgggcggcggcggggattggggtggcatccatgcgtgttcgggaggctagccaagctaccacgcgagctagagagggagagggcgagcgagaagggagaacggagggtggcactaccgagccgggacgggcgcagtgacgagcggccgacggcgcgggagcgagctctccggcctcgggctgaggaaggggaagaaggagggtgcccggagtcccgcgtccgcgcgcacacactggctcccccggagctcggcgacggacggcgacggcaagaacaacggaatggtggcaatgacgctgcgacggtggagaggcaagaacagagaggttgggatggggagggggctcggcattgggttttataggtggcgaggatggagcttcgaggggaaggaaggagggctcacgggcgtggtcaaagggcgtgggcgacgagctggctcggcgtcagctgctcctctgccatggcgctggaaacgagcgaggagagctggcgtcggcccgagaggggaaaggggaaaacggagggggagaaagggggctcgcgccttgccgatttcgggagagagagggatgggagcgagaggcgctgcctctcggttttggacggacgctggtggagcggcttgggcacgcgctgcagagctcgcggcaggcagcggggccgagcggcagcgcggcgcaggcgctgacggcggtggcgaccgggcggtcggccacgaccggcgcatgcgcgggaaccaaaggcggtggggggttcaaatggcggcggcgggaatcggcgccagggagagaggaagcagagagagcaagagagagagagagggtggcgctctctctcggctcgggcacgacgcacgtgcggaggggaggggaaacgggctgagaggagggatgggccgagggagaggaatttggcccacaaaacagagggatgcaaatagacttttgcagaggaattgaattggagagaattggagtttggaaatggaatttggatatctttggagtcgggcgaatatttagcaaggttttgagatttggaatttgaatttcgaatttgattacttggactcagggaaacagggaggggtcaaggaatggattcaaggtggactcggatatttgtggaatcgagacaaatattttggcgatgattcaaaggaggctattgacctttggaaaaattgaatcggaattggaatcttgaggtggaggattttgatggcgatgaaagggaacaacaatggagatttgaattgagatcttggcacaacttagactctcacacaaagaacgaaattttcacatataggattttgccgaattagtttttaacgcctcgcgaaaagcggagcgttacacgattctaggactctgaagccgatactgagtctaggctgatgataactcgaggcttaccaaattttggcgttaacacgcggccgaacgaactgggttggtgcttggtggggctagcttgggttcattaggtgagacgtcgttgccgaagcaacaagcaagcgcaatggtaggggtcggcattgactcggccgcgacgaagcacccattcttgatgaacccacacagcagcagcaatgtcgacgttgccgccgtgtagttagctatccaccagcacggcagcaccacgaagcatttcatgcattcgacggtgccaatgcagcgttcagcaacttgagtggaggaaggctaggggctctgcctctcgcgcttgccgttgctgcagcagctggaaatggtgaagcaggcggaggagctacgggtccgatacgacgtgctctacttcaactagcaacagcagcagacatcggtggcagtgtcggtgcagcagctctcaatagcattgcacatccaggagatcgtcggtcggttgatcgcggggaggagctcttcggtcgcgggctcgcggagtcggaactcccactggccgccaccacctggcatgcgaggagtgagaataggaaaagagggatgtgagcaaaaagaaaaagaaaagatattagtactgacatgtgggtcccatgagtgtcacataggataaaaccgatatccaaaatcccaagggactcgattagctccgattttcgaagatggaggccttatatcaagtattgtgaaccgttgagggacgtgaatctatcaggggcaagaattgaggaaggtaaaatagacttgttccttttgtttgggacataggtcattgttaacaatggaatttggcatcatatttggagaaggaaaaggaagatcgaagcggatttggtgttgaatcgaactgagcttggagttggattgcgcatcggctggatatcgtatcggctgaaaatagggtatagagttgatcgaggttgaagaagccgatggtcgatacaagccgatatgacatgacttgggctcgatatgggtctagattgggataaccgtctgtcacaccccaatctgataccgccgtacaacggcacctgacaggagcgtgtcgtagggaaaacggcgtgaaccgcttcctacgaaaccgcgatctcggtaccagtcccaggacatagtgctggtacccacggtgacaaatatgaatcatagcaatccttaatataaatagaggacttatttaccttaacttaggttgcagctcagacagcccgagaatacaaccgacgacacggacgaggaaacaccaacaacagcagcagcagcggaaccaacggactaacacccaacaccacaggcgacggctgggaaccaggacgaaaccctaatcttcacttcactttatcttctcttcagggcggaggaactatatatatatttatagagcaagggtgagtactttcgtactcagcaagtcacgggaacttaggtgtttaatgcaagcttggaagagaggcaaggttgttttgcaaatcttttgtttgaaatcattttgaaatcactaagtgatttatttctttctaagtttgggccgaaaagagacttgcgtctcgattcgactttaagagatgcttttcaacaactcaattggtaatgtaccgacctcccgggtcagatcattacttctcggctcccagagccattccacttgattaatcggctcccagagctttttttcattttctcggactcccagagtccagctgcccagcagcacaacaatccgcttccactcgggaagcctagtctatgatgcccgcagacatcccgaatcacacagattcgtttctgaccactcaggtcgtccatctgccacataggctgattctggttacgattcccacaccacaacaacttttcacaaagcacaggcaaataaatctacgcaacgggaaccacctcacatccgcccatgaccgtgggcacggctgttcgaacagttagttaacctctgcagaggggtacactttacccacaagatacgaacttattccgaacacccgtcggtatcggaggttcgcaacaaagcctttcccaagccgacccagggttacctcatgccacatagaaggatcaaatcctcacataggccattttaggcgtgcacaaatcaaactccaaccacctttgatcggtaagtgagcaagcttctcgtccttgccttacccggaacccggtttgtccgaccccgccccggcgttcccaactattggcatgcgaggtttccctgaaccgactagttacttagccagggtgtcccattccaccttgtggttgcacttgattatgttcgatgagtttcccacaggaatcggtccttatatgcgaatacgggacagtgccacataggcacaacccccgcatcgcgagttttcacaattcattttattttcaaacacaccgacaccacatgtcgggttttgaaggcttcacaaacccatttcccaagttttcgacaagcaacggtgtatgtgggatatttggtatacgcgctcagagagcacggataccgaagtaccacaagggtggagcgacaaggattcagggtagtacgacctacagaaattagtgcgactactgggtaggtccgtcggtttggcacgcaaaccgaggccaagcaagttaagtgtgtgaatctaataatgcaagttgcaaacaaaataataatgacttttcaattataggagcaattgatcaaagggtgacttgccttgctcaaggtcttcacgaagcttcacgaatcttcgagaaaacccgcgatcgacgaaaatccgataaccgcaactatacgcaaacaatcgaaaacctaaacaaaagaccaaaagaaagatcctatttagactaattagtagtgccattaaatagatctcaattttacggaattattggaagtggaacggagtcaatcggaagagcggttgggaagatatgaattttggaagtttaatttggattttctggtcaaggaaaaggatttattaaatcctttggaaaaaggaaatggacgagggatgtgaatcagacttttctcgggtggcattggcgcggcccgagggacttgcgcagctcgggcgagcctaatgggccggcacggcctgcgaggagggcggcccaatggggcgcgggggagagagggacggcccggtggaccgattccaccgcgcggggtcccgggtggggcccgcttgtcggcggcaaggttcacggtggggagagcgcacgcgggtacggtgctagggtttggtgggtgcggtgtgcgggcggtgcgccgggtggatcggatggcagcgggcccacatgcagccggttggcgcaccgtggaccgtgcgcgcgaaggtggggaagggaagaggcggctgacccggtcgcagccgacgtggctccgacgtggctgccacgcgggccaacgggaggaggaagaaggggaggccgggaatgaacggcggacggcggccgagttcaccggagcaaggcacggcctcagtggaaaaagggagcacaccggggaggagggaagggacgagacgaagcgagccgacggctcggattcgccggaggatggccggaatccggcggattgtggcggcggcaatcgccggcgagcaaagagggaaatcacgacgagacgatgagggttcgattcaaagggggtggagcatctccggggttcaaggaatccgtttccggtgtcggatggggcggaaaatcactgaggagggctggcgacgagcagcggccttcgggagcggacggcaatggcggcgaggctgtgccgggcggcgacggcgctagggaatggtttggggagaccctagggagctcaaggacggtggtggtgcgaggtattggcgagagggcccacggcggctcgcgggcgggcgcggcggcggcgaagcagagcaacggcggggcggcatgtttaaggggacgagcgagcaaccgaatggctcggggcttatccaagatgatgcagatggcgagaatttgggcgaggagctcaccggcgtgcgggaacggtatcggcggcgatttggggatggaaaggggtggaaggccgatggcggcacgcgaccgagcggcggcgcacggcggatgacgccgaggcggcgcggcgtcgaggcgagtgcgccgggggagaagagagggagaggtggcgcccggagctcctcgtcacgcgttcacgctcgcaccggctccctcggtgctcggcgacagacggcgacggcaaggacagcgggaaggcaacaatggcgcggtgaaggcgagggaaaaacgagagggatatggggaggaggctcgggctttataggcgcggggaatgtcggtttggggagggaggaaaccgacctcgtgggcggtcaaggatgcaagggcggcgagctggcggtcgttgacgcgtgcagccaaggcggcggcaggtgatgacgccggcggtgtcgggcaaaaggaaaaagaagggggaaaggggcttgttcccttgccaaaacgagaaaaaggaggagggtgagtgaggaggaggaggagagggagagcagctgcttctcccactcttggacgggtgcggcgtggagtggcgggggccatggatgacgttgacgatgacggcggcggtcggtttggcatggagcgggggcaaggcggcagcgcgtggcgtcggcggcgcaagggctgatggcggcggcgaccggccggtcggccacctcgcgagcgcgcgcgggaatgggcgaaggcggtggaggttttgggcggcgacggcgggaagcggtgtcggcgcgagagagagaaagagagagagagagagagaaacagcgagagcgagagagacagagagagcgagcgacggctctctctctctcggctcacatgcgtgcaacgcacgtgcgagggggggggaagatgatgggctgggaggggagatgggccgggggaggagaatcggcccatccaaaatcacagggaggtaaggtagacttttacagagaaaactgatttggatagaattggagagatttagggtttggattcgagttcaaatttgatactcgaactcgagggtttagggatgtatcaaggggaattcaaggagaagtcatgggaaagattcaaaaggaaaacttgggtatttgttctcgggaacatagggtggagtcaaggaaaggaaacaaaacgggggtttggacattttgggatttggaaatgtatttggcgaggattcaaaggaagggattgactttcgaatttagatttcggagacttgaattgggagaggagatttgaggcggaggattttgatttcgatgagagggaacaacgggatttgaattgagatccttggcacaacttagactctcacacaaagaacgaaaattttcgcaattaggattttgccgaattagtttttaacgcctcacgaaaagcggagcgttacagatccaccccccttacaagaatctcgaccccgagattcgaaggtggaccacacacacgaaaccaaaaagggatcttcagacttcttcacagcttcagactctgctagtcgttcttcaactttttgttgcgtgcttgccgcaaaacggtctggtattctgactcacttagcattcttcatcttactgtggctctgctcttgcctgtggaacctgttcttctcctgctccttcaacttgctcgagattcacaacttttccatttgtttctacttgcacatggttcagatgactttgtccaataggcggtgacgtcagtgagatagatccactgttcggtgccttcaaactttttggtctagatacgttgggaaggcctgtcgttggttgaactcgctttgacttgactttctgagggcaataccacgaatagtgtcccatctcatggcagatgaaacattcgactcctgccttataaccacgtctttttgaaggtgtagggcatggtacggagttgcttccttcatggctattactgttgatcattgtggcttgctgaccaggttctgacatagtcgaacgagacgtagaaccggaaccatttgaatgctgagatgctttctgatagtattgtgctggcgagtttgtttttcgacacaaatcttcttttgcttgaatctctagggacattactttgcgtctcttgtattcttgcatctctttttctgcatcttctagtaacaaggacttatcgaccatttgctgaaacgtcggaaagtcgtgagccaaaagtttcactcgcagtttcgcgtccattccttttaaaaattttctgatcttctttttatcagtgtctacatcttctggggcatatcgggccaatctattgaagcgactcaaatactcgttgatgcaagaggatccttgcttgatatttgcaaattcttccttcttcaaatcaattatgctttcagggatgtgtgctgagcgaaaggctcctgcaaactctgtccagacgatggtactagcatctgtatgggtagcacagtagttatcccaccaatctgcggcaggtcctcttaactgatgtgcggcgtaaagggttttctcttgcggagtacactgtaccagatttaatttcctttccatatctttaatccaatcatcagcttcaataggctcatttgtttgggagaactccggtggacgagaccccaagaaatcattcagttttgatttgccatcatcttgaaccatatggggttgacgctcttgtgtgtgttgttgttgcatagcaattatattctgaaccattccttgtattatatgcgtttgcatggccaggatttggtgaaggtccacgggtgggggttgattacctcttgcgacatcattaactgatccggaagcaaccgtatgatcactctcggcttcttgctcatctgtccggttaactggttgatcggggatttctgactgaactagctcttcctcaaaaccaaagcggttaggggcacggatctgacgggtggagcgacgtgccatctgcttctgagggactgagatctgactaacgcagaaatgagataagaaaaggaggaaaacaaaaacactacatcaaaacggttttcgaaatcacagaagacataggtggtgtgttccagccggtaacccaactggtctaacacctgaacacggactaccaaacaaaactcacacacgcacttagttcaccacaactcctaccgagcgggtgacggcactaaggttagcctaccaacaagggcttaactaagactcctagaggcttgagcacacctttcttcaactgggcgtgaagacaggtttactctaggataaaagtcaaaacgaacgactagctcctacttttggacaccaaagatctttcgcaaaactagagcaaaaggggacaacgacaccttagctttcacaaatagtttttgtattcaaataatgccatcctattcaggggtttcgatcctagggccaactaatgctctgataccatctcttgtcacaccccaatctgataccgccgtacaacggcacctgacaggagcgtgtcgtagggaaaacggcgtgaaccgcttcctacgaaaccgcgatctcggtaccagtcccaggacatagtgctggtacccacggtgacaaatatgaatcatagcaatccttaatataaatagaggacttatttaccttaacttaggttgcagctcagacagcccgagaatacaaccgacgacacggacgaggaaacaccaacaacagcagcagcagcggaaccaacggactaacacccaacaccacaggcgacggctgggaaccaggacgaaaccctaatcttcacttcactttatcttctcttcagggcggaggaactatatatatatttatagagcaagggtgagtactttcgtactcagcaagtcacgggaacttaggtgtttaatgcaagcttggaagagaggcaaggttgttttgcaaatcttttgtttgaaatcattttgaaatcactaagtgatttatttctttctaagtttgggccgaaaagagacttgcgtctcgattcgactttaagagatgcttttcaacaactcaattggtaatgtaccgacctcccgggtcagatcattacttctcggctcccagagccattccacttgattaatcggctcccagagctttttttcattttctcggactcccagagtccagctgcccagcagcacaacaatccgcttccactcgggaagcctagtctatgatgcccgcagacatcccgaatcacacagattcgtttctgaccactcaggtcgtccatctgccacataggctgattctggttacgattcccacaccacaacaacttttcacaaagcacaggcaaataaatctacgcaacgggaaccacctcacatccgcccatgaccgtgggcacggctgttcgaacagttagttaacctctgcagaggggtacactttacccacaagatacgaacttattccgaacacccgtcggtatcggaggttcgcaacaaagcctttcccaagccgacccagggttacctcatgccacatagaaggatcaaatcctcacataggccattttaggcgtgcacaaatcaaactccaaccacctttgatcggtaagtgagcaagcttctcgtccttgccttacccggaacccggtttgtccgaccccgccccggcgttcccaactattggcatgcgaggtttccctgaaccgactagttacttagccagggtgtcccattccaccttgtggttgcacttgattatgttcgatgagtttcccacaggaatcggtccttatatgcgaatacgggacagtgccacataggcacaacccccgcatcgcgagttttcacaattcattttattttcaaacacaccgacaccacatgtcgggttttgaaggcttcacaaacccatttcccaagttttcgacaagcaacggtgtatgtgggatatttggtatacgcgctcagagagcacggataccgaagtaccacaagggtggagcgacaaggattcagggtagtacgacctacagaaattagtgcgactactgggtaggtccgtcggtttggcacgcaaaccgaggccaagcaagttaagtgtgtgaatctaataatgcaagttgcaaacaaaataataatgacttttcaattataggagcaattgatcaaagggtgacttgccttgctcaaggtcttcacgaagcttcacgaatcttcgagaaaacccgcgatcgacgaaaatccgataaccgcaactatacgcaaacaatcgaaaacctaaacaaaagaccaaaagaaagatcctatttagactaattagtagtgccattaaatagatctcaattttacggaattattggaagtggaacggagtcaatcggaagagcggttgggaagatatgaattttggaagtttaatttggattttctggtcaaggaaaaggatttattaaatcctttggaaaaaggaaatggacgagggatgtgaatcagacttttctcgggtggcattggcgcggcccgagggacttgcgcagctcgggcgagcctaatgggccggcacggcctgcgaggagggcggcccaatggggcgcgggggagagagggacggcccggtggaccgattccaccgcgcggggtcccgggtggggcccgcttgtcggcggcaaggttcacggtggggagagcgcacgcgggtacggtgctagggtttggtgggtgcggtgtgcgggcggtgcgccgggtggatcggatggcagcgggcccacatgcagccggttggcgcaccgtggaccgtgcgcgcgaaggtggggaagggaagaggcggctgacccggtcgcagccgacgtggctccgacgtggctgccacgcgggccaacgggaggaggaagaaggggaggccgggaatgaacggcggacggcggccgagttcaccggagcaaggcacggcctcagtggaaaaagggagcacaccggggaggagggaagggacgagacgaagcgagccgacggctcggattcgccggaggatggccggaatccggcggattgtggcggcggcaatcgccggcgagcaaagagggaaatcacgacgagacgatgagggttcgattcaaagggggtggagcatctccggggttcaaggaatccgtttccggtgtcggatggggcggaaaatcactgaggagggctggcgacgagcagcggccttcgggagcggacggcaatggcggcgaggctgtgccgggcggcgacggcgctagggaatggtttggggagaccctagggagctcaaggacggtggtggtgcgaggtattggcgagagggcccacggcggctcgcgggcgggcgcggcggcggcgaagcagagcaacggcggggcggcatgtttaaggggacgagcgagcaaccgaatggctcggggcttatccaagatgatgcagatggcgagaatttgggcgaggagctcaccggcgtgcgggaacggtatcggcggcgatttggggatggaaaggggtggaaggccgatggcggcacgcgaccgagcggcggcgcacggcggatgacgccgaggcggcgcggcgtcgaggcgagtgcgccgggggagaagagagggagaggtggcgcccggagctcctcgtcacgcgttcacgctcgcaccggctccctcggtgctcggcgacagacggcgacggcaaggacagcgggaaggcaacaatggcgcggtgaaggcgagggaaaaacgagagggatatggggaggaggctcgggctttataggcgcggggaatgtcggtttggggagggaggaaaccgacctcgtgggcggtcaaggatgcaagggcggcgagctggcggtcgtcgacgcgtgcagccaaggcggcggcaggtgatgacgccggcggtgtcgggcaaaaggaaaaagaagggggaaaggggcttgttcccttgccaaaacgagaaaaaggaggagggtgagtgaggaggaggaggagagggagagcagctgcttctcccactcttggacgggtgcggcgtggagtggcgggggccatggatgacgttgacgatgacggcggcggtcggtttggcatggagcgggggcaaggcggcagcgcgtggcgtcggcggcgcaagggctgatggcggcggcgaccggccggtcggccacctcgcgagcgcgcgcgggaatgggcgaaggcggtggaggttttgggcggcgacggcgggaagcggtgtcggcgcgagagagagaaagagagagagagagagagaaacagcgagagcgagagagacagagagagcgagcgacggctctctctctctcggctcacatgcgtgcaacgcacgtgcgagggggggggggaagatgatgggctgggaggggagatgggccgggggaggagaatcggcccatccaaaatcacagggaggtaaggtagacttttacagagaaaactgatttggatagaattggagagatttagggtttggattcgagttcaaatttgatactcgaactcgagggtttagggatgtatcaaggggaattcaaggagaagtcatgggaaagattcaaaaggaaaacttgggtatttgttctcgggaacatagggtggagtcaaggaaaggaaacaaaacgggggtttggacattttgggatttggaaatgtatttggcgaggattcaaaggaagggattgactttcgaatttagatttcggagacttgaattgggagaggagatttgaggcggaggattttgatttcgatgagagggaacaacgggatttgaattgagatccttggcacaacttagactctcacacaaagaacgaaaattttcgcaattaggattttgccgaattagtttttaacgcctcacgaaaagcggagcgttacaccgtcattgccaaatagagatagagctcgattaaggcaactgtatctaataattagggtattgagtcggtttgttagagatttggtaagagatcgccgtatatggtcttgtttgtttcttaactttagaaatgtttgagtcgtgtccataatggactaagtttgtactcgaggtataaatatgagccccatagcattgtaatacggaagccaatccaatacaactttggcgcatcgccactgttttacttttctcgttttccagcgagttcttcgcaagaggtaactcgtctcaatggcccgcgctgacgtgttaggctcgacatcgcgagtcattgctgtcatatgtctttaatctattcttagcttctcaatttagctctatcggctgttgctcacttcagggtttgtgttggttttagttaaattgtcttgctagattagattagctaaggcacctaccatcctgaaaagtgtctaatttcttgattgtctacactgtatgtttcttttcatactttaagatgcatcatcccttgcatgcttagaaccatgcaaactagcctacaattaggcataataaggatagtatcgggtttcagccgatcttacctaatatgcatgtttcacccccctgtttcatgtatattcgccacttatatagatagatcgttttatataagcatatcaagttttagtcagtatcggctagattcctacaccttcatgcttgatttatatttgatatgtttatatggaccaatctgtttatataagtttgtactagagtattagctagtacgttatttttcttggtctaaatattgtcacatcggctactttcataatactgtcttaaatcaatctattgaattccatagattgtattacagtcgattgggcgtgtttagggtttattattatttcatatatccagattatagccgatttggtctaattctatcggctgagaccatcaacgatatgctatcatcctatcggccgatcaactatcggtcgattgattatgcttttattcttttttgctgattgcaggattaaatcagctggcacacccttgacacactcgaggctagcattggacctgcactggagttaagcagatctcccatgccaccgtattttcacatcaaaagtcgtttactagtccatttcaccatccctgggccacatcctattttgcccgttcgtgctatgtagtgcagtcattgagttgtaatctgcgataggcagcctattttcaccagtagatatggggaatgttacatgatagtatcccattcggatgggatgatacctagctaggtataaggcgatacctcgaaagtatcatcttctccgaacgagttatcagtcgatacctactaggtatcagacgatctctctaaggtatcattccgtctaaatggggaaaggtaaaagtttgtttttttagaatttttgcaggaacaatttgagtgaacatgcaggaaaaatgttaggctcagaaattttatccaaaaaggaacaaaaaaaaactcagacattatatcaaaaaagaaaaaaaactcggacagcaacaacagcgggaagaatatcaaggaaggcgacgagtttaagctctgtaaatgcggtcaagctacggcaatgaaggctaccacaagatttcacttttaactaaacccctgggcgatgaacccggagctaattacataccactagtaagtagtactatattcataccccatctccagagaactggtcagggaaaatatcctccacttttggttcgctccgaaggctcataaggttccctattttttttttttatctctccatcagtatctccttcaatctgtttacgatataccacttcatttcgtgttgttaagtatgccatatgtgtatttgagtcttgggtatgataagaacaaacgtgcaaaacctagctttagacttaggagtctcaaaattaagtgtactgcatacatgtgaataatgcactaaggaaaaaaaaggcaaatcatatgatagaatcagtggctaacactgtgccttctttcctttgtatttttgcagcttaagttactcaaaactcggagaggttacctgcatacacgactgtacacgaaatgcttatcccgctgctgctactgttctacggtgttggcaacatcagtggctcaacgcttcctgataacagcacagatatgctctctcttcttggtttcaaggaagccatcaccaacgatccgtcaggagtcttgagcaactggaacacaagcatccacctctgcagttggaacggcgtctggtgcagccccaagcaccccgggcgagtcacggcgctcaacctcgccggccaaggtttgtccggcacaatcagcagttcagttggaaacctgacttttgttcgtacgcttgacctatccaataataacttctctggccaaatgcctcatcttgccaatctccagaagatgcaagtccttaatcttagcttcaatacactggatgggattattccaaacaccctcacaaactgttccaacatgaggaaactagatctctatacaaacttgctagagggtgcgattcctccgccaataggtcggcttagaaatctagtttacattgacctttcccggaataatctgactgggatcatcccggcaagcctaaaaaatatatccctattagaaacaatctatcttcaacgcaaccaacttgaaggaagcattcctgatgagcttggccaattttcaaatatttcgttgatggccctaggggcaaacaggctatcaggtaatatcccagcaagccttttcaatttgtcttcccttcgaatactagaattacgtgcaaatctgctaggagggattctgcctagtaacatgggaaatcatctcactaatctacaacacctcttcatgggccagaacatgttcaaaggtcatgtaccagcttccttaggcaacgcttcaatgctagaaacaatagttttacaatctaacaatttcaccggcagaatccctacctccctcgggaagctatcaaatttgtataagttggaccttgaactaaacatgcttgaagcaaaagatactgaaggatggaaattcctggatgcgttgacaaactgcactgctctagaagtgctcgcattagctgaaaatcaactacagggagttataccaaattcaatcggtagcctatcgaacactcttcggtatctcgtgttgggtggaaatgaactatctggcatagttccctcgtgcatagggaacctttctgggttaattcaactgtcattagatgtaaacaagctcacaggttcgatcagcccatggattggaaatcttaaatacttggaatatttaaatcttggaaagaacagattcactgggcctattccatattctattggcagtcttacacggctgacagagctctatctggaaaaaaatgcatttgaaggtcacataccaccctccttgggaaaccctccactactcttaaagctggatcttacctacaacaatcttcaaggcaccataccttgggagattagtaatcttagacaactcgtctacctgaaacttacatcaaacaagcttactgggaatatacctaatgctttggaccgatgccaaaacttagtgaccatccaaatggaccaaaactttctcacaggaaccattccaatttctcttggcaacctaaaaggcttgagcgtactaaatctttcccataacatcttatcgggcaccatcccagcagtactgggggatctacctctactcagcaagctggacctttcttacaataatctccaaggagaaataccaaggattgaattattcagaacatctgtttatcttgaaggcaataggggactatgtggaggagttatggatctccatatgccatcgtgcccccaagtttctcacagaaaagaaaggaagagcaatttgaccagattgttgattccaatagttggtttcttgtcactcacagtgctgatatgccttatataccttgtgaagaagacaccaagaagaacatatctatcgttgctttcttttggaaagcagttccctagggtttcttacaaggatatagcccaagctacagggaacttctcacagtcaaacttaattggaagaggaagttatggttcagtatataaagcgaaattaactccagttaaaatacaagttgctattaaagtttttgacctagagatgagatgggcagacaaaagcttcgtatcagaatgtgagatcttaagaagcattcgacatcgaaaccttcttcctatcctaacggcgtgttcaacaatagactatagtggaaatgatttcaaagctctgatttatgaatacatgcctaatgggaacttggatatgtggttgcataaaaaaaataccgctgttgcttcaaaatgtttgagcttatctcagagagtaaatatagccgtggacattgctaatgcactgtcctatttacaccacgaatgtgaaagatctattatccattgtgatttgaagccaatgaatatccttcttgacagtgatatgaatgcatatttgggagacttcggaatttcaagcctcgttcttgagtctaaatttgcctcacttggacattcctgtccaaatagcttaatcggattgaagggaaccatagggtatatagctccaggtatatatggttattgccacatcttcaattcatgaaaggcaatttgttttctgaattaatacttagacgttgcattgtactaattagtgtgattttatcttttcttttagagtatgcagagtgtggcaatgcatcgacctatggggatgtttacggttttggaatagtacttctagagatgctgacaggtaaaagaccaacagatcctatgtttgagaatgagctcaacattgtcaactttatggagaagaacttcccagagcagataccacatataattgatgctcaactccaagaagaatgcaaaggcttcaatcaagaaaggatcgggcaagaaaataggttctataaatgcttgttgtctgtagtgcaggttgctctttcgtgcactcatccgatcccaagagaacgaatggacattagagaaatagctattaagctgcaagcaatcagaacatcctatgctgaagcgaccaagcgagacgatatgcttcgaagaagggagttacaatgtaccattgaacttgtgtaattgtgttgtctgttggctttgaatacaacgtgcataaaacatgataaattggccatcagcatacactggatgtgtgtgtgaggaactactcttctgtactgcaatatatagttgtgggttaattttatcatccttaaaaagatattggaaagtaacatattttgtaggtaccttgagttactttctcaagaatcgtaaaatttctcatagttatgtgtgcgactatggtggaaagcagtattggtacgcactgtgcattgacactttgatttgggtttcacaaatttggggaacggttcctacaggctacagtttatgtaactgggataatgggattgtgcatgaaggatatatatttttaagccgggccggcctaagataggcggacaaaatttacttaagaaaggagtatggattgtgaaggatataagctaggtggttctttggacagcttatcatggcgattaatatttaatactccaggaacataaaccaaaatctgcataattggtgtcagattgcatggaacaacacagctaatccgcgcttatcattcaggagttaggactatcacaacctaagttgggtcgatccctaaatccaaatcccaacctgcagttactgatcactagaggagtatataagattgaggaaaccctcgggtaccttacctgtaccgtgcagtggtatatgcccattcgacgaaagccgatccgtgcgctgccgcgacgtcttcctcttcccgctaggagaatcgacggccttagccaggacgaagtgtctgattccggtaacgatgagggcccgccggagcctgcgcccccagccaaagcagaatgcgtctcccgagctcaaggggaagaagaggaagacgccgccgcgcgaggtcggtgagtcttccgcccggcgccaacgtgcaccgccgcggcgcctccatcctcagctcctgcagggttgctcggctgctgatagctttgctttgttgggccatatgtatactacttgggccgttctaccacttctagcaggaatcctatcttacgcagacgcgctagcaaactaactcgcgcacgatttggatccactaggcccaccctatcctaggctgcagttgttagcatttttttctctttttcccgtgattttctctcctcgtttcatgtgcaacctttttttctcgcctgatttttttcttttttattgcgcgatttttagctctttttttttgcaagattattttttccggtgtgctatcaggctaggtactcattttattttcaaaaatattgatgcaaaatttaaaaaattctaacacaaaaattgaaaggttctagctcaattttgaaaactttcaactaaaaatttgaaactttcaactgaaaatttaaaactttcgatcaagatttgaaaactttcaactaatatttgaaactttcaactcaagattgaaaactttcaactcaaaattgaaaaactttcaaatccaatttgaaaactttaaaaactttcaaaccaaatttgaaaactttcaactaaagattaaaaactttcaactcaaaatttgaaaactttcaaatccgatttgaaaactttaaagttaaaattcaaaactttcaaatcaagtttgaaaactttcaactcaaattaaaaaaaaccatatccatttttttactttcaggtctaaattgaaaattctcagttcatcttttaaaattttaattctactaatttgttcgttattttgctataaataattacgcttttacgctaatctaatcgtgtttagcgctaagcgggcgcttagctacgtgtggcatggcgacgcgcacgcgagttactttagcagcgcgtatgcgtgagctagtcgtgccccacttctagagccacggcgcgtgcaaaccctgcgttgtaacgagcttggcaccagggggcaacgccaaagaggaatgagttcactggcctcttaactttacgtcgagtttgcatgacatccttaatcccaataccagaaatcttcacccctaaattatacaaaaccgtaaaatttaggtcctagggcagtatggtctctggtttcattaacgtggcatcctagtaagcaaaataaaaaataaaaaaattacaggatccacatgtaagcgagtaaaataagaatatggggcccttatctcttctttctctcttttcttctctcctcattttcttttctttcttatcttctcttctcttctcttctcttcagcaatcttgggaggcaggtggcgtgagagaggggagatgtagctggtgagcccggccaagctccgccgccttgagcgccttgcgacgggaggagggaacggggtagaggggacgcggccggtatgagatgggaggggagaggcacggtgattgggatggcgaggtgataggggacggggggcgcgtgcacgacgacagggactacgaggcgatgggggatggagcgtggggcaggcaggcgttgtgatggcaactcggtgcctccttcacgggggagccgtggtgattgggacggcaaagcgagcggcttggtgacggggaacagagtgtgggacaggcgagcgagcatcatgaaccagcggtcttcgtgggcggcgacctgttgctcgaggtggagcggcggtgtgacccgcggtcaccgaggtcaccacctgcttccaccaccttttcatggccaccgtcgccgccgcccctaggcgtatcctatgagatcttgcacgggcacatcgcccgtggcttgctatcgtctccgtagcccacactagaggatgactcgccttgcggcttcagtgtttagacgggcaccgatagcggcgacgcctgctgcgcctccgcggcatggctccggctgccccttgtgcccctggtcccatcaccaccacaggcttgtcgagggtggtgaatggtgctccatgaccgcaccttgccacccactacacggtgaccatcgtcgaacactagcgagttgtggatcatctgtgacatgccacattttccgctggatctgcggcggtcaccgtgtccaccaccaccaccacaacaacaatcaccacaagcgtcggcgtgtcgtagacagccatgggggacgacgagaagggcggcacgaagcgcgcaagaggagcagcctcagcagtatgaggcgatgacgaaggcccctccatggtgcagccgctccagagtgaggtggcctcggcggtgaccgccgacggcaactcgcagcaggtgcagcagtggcctgcgcccacaccgggctgatgttccggctcgtcagaggagtcgacgacgctgacaccaagtgagcgctaacatgtggggcccaccgtacaccacgtcagtgaaaccagggataaattgggtctatactgcctcaggaccctttttacatggttagggatagttgaggggtagagatttctagcattgaggattggggatctcatataaattcgatgtaaagttaaagggacgtcaggtgaacttattccacgccgaagacgcttcctcgcgagaagcatatgcagccactagcccactaccttaagaggggaaaaagataagaaaaggaaaatcttctgcggtcctgccggatttcattcccatttccccaacacgcaaatcagagaacactggcaagaggacaaactactggagacgaaaaatcgaagtaaacagtaaacaccaaaggagtcgctctctcttctcttctcttctcttctcttagcaatgggccatggcagtggatgcaacactgctgtagaggccgtggaactgcgttttaaaagttctgtatccaggggcctaaacccgctgtatatgcaagttaattagtatctctagtctacggcaaaccgacgattacagggagagttcgccgtggcggtgctccctgttcgagcagaggttcgttaactttctcttgttttgttttctgattagactgtatgcataaagcactgcatgtcttatttactgcgggctctggcttgaataggcctaaccactcctagttcccgtctacctcacaatgacaatataatacttgtgtgtgcttgacttatgtgatatatctccacagataacgatgtgagagagaacgacggaaatagtgacgggagtggcatggttttaattttaaaaatttacagtggctactagccgataacgtaaacagtactatagtagtgacatttttctgatttgtcacatttacagtggcatggatccaattaaccctatacagtaccatattcactcgtagattttattatgagacagataaagcaatagcgaagctttcttttctagccgtatgtgttttacttgggccgtacaaccactgctggtcactttgtacgttacgcacgcgctgtgctcaacctctttgtggacaattgcgcgccgcgactgacacttcgacggtaactgctagatatctgcagcatgtgaagtaaaactttggcaagaggacgtaatactggtctactgcctccggagatggaaaatctggatcggtaaaagcggtcgagaactcgagatacggcagagaaatggacgagggcgccagatgtgacactgctgtagaattgtgttttttaaggccattgtccaaggaccaactgcccaatctggtactacttgtcttcggcaaaacagatttacagggagaattcgcaaccgctgttcgctccgagtggagattcccgtcgattcctatcagtatgccctacgcactgcctcagcgatttcatattgtgcacatggacataaaatacatcatatgcctattcattcatattttgcaggtgatatgtgttccgagcaagagcaacccgtgaaactcgccatgtttatacaactggtgttgttgctgctattttatggagttggtaacgtcgtccattgctcaactgtccacgagttcagcatcgatctgcaatcactgctagatttcaagaaaggcatcacggaaagatccaagcggagccttaagttcttggaacactagcactcacttctgttggtggaaaggtgtcatgtgcaccactgcacggccgtttcgcgtctcaacgctgaatctctccgcccaaagcttggcaggggaaatcacctcctcccttgcaaacctcacgtttcttcgtgcacttgacttgtcctcaaatcgcttctttggtcggttccctctccttaaccacctacagcatctgggttttctttacatgaatgacaactcactcgatgggattatttcggacacacttacaaattgttccaaattgacacaaatagacctctctaataaccagctgcagggtgcaattcctcctagaataggatccctagagtatctgaaccttggcaataatagtctcactggaatcatccctgcaaccattggaaaccttgtcaaatttggatatttgaaccttggtatgaataatctcactggaatcatccctgcaaccgttgaaaatctcaccctgttaacagttctcaggcttgaatacaatcagtttgaaggaaaaatcccagatggggtctggcaattggcaaatctgacatatcttctcctaggtcagaataggctatcaggtggattccacaggccctaagcctgcctcttctcacattactttggcttttggcaccaaactttggctatgccctccaaagtatccaacaggtaaaacaagtttgaaggtcacatttcagcagtgttactgagcaaaacatggcatcagtaattcagaatcgtcgcagtactaatgtgctcccaagtgcaaatgcacctataattttaccatttgaatcattgcaataagataacatctataatcctcaggaagcttacatccagcaagaccctttttgtgatgttatcatgttttttttcttgaatggaatcagcacgagattatgctatttcattaaatatagcgagagaaatgtacaacccccctaggagaagaaaggaaaaggctatacaaaactatacgtgtgaaggatgaaactctctaagctttttagctccggccagaacccaagttcatgcttcttcctttattttggccaacagcctaggatgtgttattttccatggtttcccaacccatctcctttgtttttcgcgtgtacgtttttcaaattgctaaacgatacatattttacaaaatgtttatatgggaaagttgctttaaaaaaaatcatattagtccattttcaagtttttatagctaatacttaattaattttgttttaatctatcgctccattttccgtgcggagaggaggggtttccaaccccttcaaaagaacacaaccttaaacttatgttcgaaaacacgctgatttctctccttccttgatgttatcatgttaaatatgttcaaatgacaacacctagagaagtagatctatcgatattggtatatccatctattcgtctcctagtgacaaaattctggcataaaatcgtacccgttcttttcatctctaccctattaaaattctatagaataaaaacttgcaaaaactttgaccacaccaaaaattccagtggtgtgtttggttgggttgatgagcctgtataggagatggtcgtccgagtttttgtagtgtttggttggagggcatggtggatggagcggtccagaatagggaatattccctcaatatgctggatgagtgcatccggccgatttggctggatgaagccatccagttttggactaggtgatgtgtcctattccgattggttgtggttggtttgatttcctgttaagcaagctccaaatgattttgtctcctaaatcgtttatctaatttataatttgattacaccattatatttgttatagttaaatctttaaaacaagatctcggatgattatattttgataaaaaatatatatgacaaacgggtcccactaacttttgactttttccatccatgatatatctctccaaccaaacaagaaattggattgttatatccatataaaccaaacagaaaattggatcgccatatccaacaaaatatggatgaccatatactatccatacttaaccgtgaaccaaacacacccttatgcatgaataggatatggccatccatatttagttggatatggcgatccaaatttttatttggtttgtatgaatatgacgatccaatttcttgtttggttggaggaatatagcatggatgggaaaagctaaaagttagtgggacccatttgtcatatatatatatatatatgatacccatataggactccatggtgctcgggctccaaggtataaaacacacaaattctctcaaatttttaaaaattttcaaattgtgagtatatacctaggtatatgaatttgattcatacaaatacctaacaacaaaacaactcaaactcaattttatttcacaattcattattacatacctaacgaattatatgtttgaatgttatatacctagaaccgaaatctaacaaaaaaaaagttcaaactcagttcaaacttgtttgagcttgttagtaaagaagttaatgttcatatctaaacatttaaaaaaatttcatacttattcaaattgggtatatacttaatttgaatcttggagcccatactccatgtagcaccagttaatttacctatatatatatatataatcatccgatatcttgttttaaagatttaattataacaaatataatggtgtaatcaaatcataaattagataaacggtttaggagaaaaaatcatttggagattgcttaaaaggaaatcaaaccaatcacagccaatcagaataggacacatcacccagtctaaaactggatggcttcatccagccaaatcggccggatgcactcattgagggaatattccctattccgggccgccctatccacccttccctccaaccagacactaaaaaaatcggatgatcatatcccatcaagtccacctaaccaaacacacccggcatcaaagcaaaccaacccaaaatctctgtccctgtccggttccggatgaaacatagagatggaccaaaagtaaagatctctgattgaaactggacatgccacaacaaacttgccagctcaaacagtgacgagcagcgacgggtgacaaggtgaaattttacaacaactggcaagtttgacggactcaaggtcttcgttccaacggcggcaaagctgagataaggcttgagcttgagtgcttgaccatggcatatgcaagtcgtggatgtgaggccgctgaaaaaccagttttaagcccctgcaccctgaggcgtgagccagattagtacccaactcaaagttcacacttcacacaccacccagccaaacaaagcagaatttccatcatgtgcactctgggcaagcagaggggcagaggtgcgctgctcttttatgcctggttatttggttaatacttggcttttttactccatcatctttagttagtacgtattaaaattagttgttgcgagtgagctgtgaaacatttcagaaaaaaaatttagaggactttcagaaagttgcaccttgtttttttaatgaagtactttctccgttttatattataagactttctagcattatcctatatatgttaatgaatctagacatatatgtgtgtgtctagattcattaatatctatatgaatgtggacaatgctaaaaaatcttataacctgaaacggaggtagtacaactttgtgtttcaaattacatttagactgcattcgtttctcacttctcccaacctctactctctcgttttccacacgtacaatttcctaaattgttaaatgatatgtttttttaaacattatctataaaaagttattttaaaaaatcatattgatctattttttaaaaaactaatatttaattaattatgtgctaatgagactctccgttttacattcgctccatttgcagcatggtagggactaggacttgcgaagttgggattgtaagattaccagagttggagcattggagggtagggctgattgcgtaaccatgaagtagctccagtagcgatcataatatgtcgcaatatttatgtttcactaattgcaggcagcgagggcctgatgtctgtcaacaaaacggtgaaactgaccatgcccgttctattggcattgttgctgttgtcctatggaactggaagcattcgttgcacgacgatcgctgggaacagcacggacgtgctctcgttgctcgatttcaaagccaccaccaacgatccaagaggagccttgagctcctggaacaccagcatccactactgttggtggagcggcgtcaagtgtaagccgaatacccgagggcgagtcacggctctgaaactcgcgggacaaggtttatcaggccaaatcacctcctttcttgggaacttaacggaccttcacacacttgacttgtccagcaataatttctctggccaaataccccctttaaccaatcttcagaagttgaaataccttcgtttgggccagaattctttggatggtataattccagattcactcacaaattgctccaatctattttatttagacctctctaataacatgctagagggcacaatccccccgaaaataggtttcttaaataatctctctgtattggccttccctttgaattttctcaccgggaacatcccctcaacccttggcaatcttacaaacttgaatataatgctcctcgcaaataataagattgacggaaacattcctcaagaactggggcaactgtcaaacttggggtggttgtccctaagtgaaaacaacctatcaggtggttttccgcagggattcttcaaaaatctatcttctcttcaaatattaagcattcagacgaccttgcttggtggcacattgccatttgacattggcaatacactccctaatctcacaaaacttttcttggctgataacatgtttgaaggtcatatcccagcttctttaggcaatgcatcattgctacgagggatagatctatccttaaataattctactggccatattcccaactcttttggacggctttcaggtttgtctacattaaaccttgagacaaacaagcttgaagctagggacaaccaaggttgggaattcttagaagcgctcagaggctgcaacaatttaaatgtgctctcactagctgacaacctgttatttggggacgtaccaaattcaattggtggcctatccatcaacctgacaattttattgttgggcggaaacaacctaacagggatagttcctctaagcattgggaaccttcaaggcttaatttcattggggctagataataatggtttcagtggtacgattgagtggattggaaaactgaaaaacttgcaatctttatgccttcgaaataacaatttcactgggcctattccatactccattggcaagcttacacagctgacagagctctatctgcgaaacaatgcatttgaaggtcacataccgccctccttgggaaaccctcaactactgttaaagctggatcttagctacaacaaacttcaaggtaccatacctctagagattagtaaccttagacaactcatctacctacaacttgcatcaaacaagcttaatggggaaatacctgatgcattggggatgtgccaaaacttagtaaccatccaaatggaccaaaactttctcagaggagacatgccaatttcttttggcaatctaaatagcctaaccatactaaatatatctcataacaacttatcaggcaccatcccagtagcactaggctatctacccctactaagcaagctggacctttcttacaacaacctccaaggagaagtaccaacagtgggagtattcagaaatgtgacatctgcttatctcgatggcaattcaagactttgtggaggagtgacagatctccatatgctctcatgccctcaagtttctaatagaataaaaagggattctgatataacaaagagggactacaatctggtcagattattagtaccgatatttggctttgtgtcactcacagtgctgatataccttacatgcctagcaaagaggacatcaagaagaacagacctattgttgctttcttttggaaagcagttccctagggtttcttacaaggatctagcccaagctacagggaaattctcagagtcaaacttaattggaagaggaagttacagttcagtatatagagcgaagttagctccgactaaactacaagttgctcttaaggtttttgaccttgaagtgagatgtgcagataaaagtttcttatcagaatgtgaggtcttgagaagcattcgacatagaaaccttcttcctgtcctaactgcatgttcaacgatagacaatagtggcaatgctttcaaagctctgatttatgaatacatgcctaatgggaatttgaatatgtggttgcataaacaatttgcaagtgttgcttcaaaatgtttgagtttagctcaaagagtgaatatagctgtggacattgctaatgcattgtcctatttacaccacgaatgtgaaaggtctattgtccattgtgatttgaagccaactaatattcttcttgatgatgatatgaatgcatatttgggagacttcggcatttcaaacctcgttattgagtctagagtcacctcacttggacattctagtccaaatagctcaattggattgaagggaactatagggtatatagctccaggtatatatggttatttccacatcttcgattcatgaaaggcaatttgttttctgcattaatacttcaacattacattgtttaattagtgtgatttttatcttttcttttagagtatgctcagtgtggccatgcatcaacatatggggatgtttatagttttggaatagtacttctagagatgctgacaggtaaaagaccaacagaccctatgtttgagaatgagctcaacattgtcaactttgtggagaagaacttcccagagcagataccacagataattgatgctcaactccaagaagaacgcaagagatttcaagcaacagccaagcaagaaaatggtttctatatatgcttgttgtctgtattgcaagtggctctttcttgcactcgtctgatcccaagagaacgaatgaacactagagaaatagctattaagttgcatgcaattaaaacttcctatgcagaagcgaccaagcgagaaagtacgctttgcaggagagagttagagtgtgtcatggaactagtgtaattgtgatgttttgtagttgtaggctttgaatgcgatgtggatgaactgccaaacaggccatcagcatacacagatacactggatgtgagaaactactcttctgtacagcaacatggctgtgtgcctgtggtggatggtgtattattggtgtattatttgggtttcgcaaacttggggaacgtcttttacagtttgtctaactgggataatgggattgcgaaggatctaagctttgattctctttctgaacagcttgtcatggtaattaataatacgaaaatgaatcataatatgcacatctgttgtcagattacatcggagaacactgccaatcgccaaatccactttttttcacttagacctaggactatcacatccccccggcataaaaataaggactatcgcatcctactaagttgggtcgatccctaaatccaaatcccaacctgcagttggtaatcactagaggtcagattgaggaaaccctcggcctcgggtacctgaaccctgcagcggtatgcccactcgccgaatgcccgtccgtgtgcctcttcgctccgccctctagcgaagtgcgccgccgctgcagcgcctgcgcgcgagacgtggactgtggagtggtcgggtgctacggtgctacctccgcgtccgccgcaacgtcgtggagtcgcgctgttaagtggaaccaaacaagacagggcaaagctactccttccgagttccgtcaaaaaaaaaaataaacatgggagggatgtgatattttctaatacaatgaatctggataaaaggccatccagattcattttactagataatgtcgcatccttgtctaggttatgtttttttaacaaaggaagtatgttgcgacgaagatggataggctcttttaggctcctagtagaatggcagtttggcaaggaaaaagtccctcaacttatcatcgagttacaaaatcgtcccccaaccacaaaacaagatatatagcatcctcaacttacaaaaccgttcactttaggccattcggtggttttgaccccggtattgtccgacgtaacagctgactcggcgtgggacccgcatgtgtcgcacatgtcagactgccctcgtcagccacttcttaccctcccccatcaactcacttcctctcccctcccctctccatgggcggtggccaacggagagcagccaggacacggcaggacggtgtggcgggcacggtcggcgctgcagaggagcacatcgcggtcgggcgccgccatggcctcttttgtcttcgtcatgccttcgtcgccgctatggccttccttgtatcctctccccaagggtcggcggcggcgagcacggcacgccgcgacgtggtgtgccctgttgaagtcaccccggtcgacgaggtcggcacacgcgagcggggaggggcgtcggtggcaggaccataggggcagagcgaagggggagctggaggggaacggtggtggcgaggtggaggaagagggcgccgcttcgacgaaactcccatccagggcgagggaggagcggaagacagagaccgcggcaacgggagggaggtggggatggaggcggcgaggagagagtttgccggttgacgcgctgtcgtcgccgccgttgtccatcctgcccttgctcatccgcgaggctgtcctcaacgagtcgccgcctaaaagtgctttgttcatagtttctagatcaaaaaagagatctatgagtccaggcataccaaaggcgtggccgccgctcatccacatacgccatcagtcgctcatcacgcgttcacgctccgccatccagcgacggggcgaccacgtcaccgcctggcaaatccaagaagaactagtaggaggggctgaacaaaccgtataaaactatagtcccctcttctaatgaatgtatgacataataaaattctagtggggttttatggggcctcttatgattacaataccggaagtggaggctcgagaccctatagcccccatggtagatccgcctgcctgcaagcctagatcgagtgtggcggtcagcggagtttggtcaggtgaagcatcgatgaatacaggcagtgtcgtttcttctgggcttggtgatgctgcaccatttctccctggaaaaagtacaccgaaggtccctcaacttgtcatcgggatacaaaaacgtcctcaaaccgcaaaaccagatacgcaacgtccctcaactatacaaaaccggtcacaataggtccctcggcggttttgatcccggttttgtcttacgtagcggctgagtcagcgtgagacccacgtgggccccacatgtcagtgtaatccacgtcatcaccctccctctctccccccctcttctctcccttcctcaaatctctctctctctcacttatctgcaaggtagccgacgcgagacgggagaggaggggggcggcgccgcgacagcggcggcggtggcggccgccgccgccgcagtggggaagcatggcagaggcgcggggaggccggcgagctcctcccaagtacaaatccgacgtcggcttggcggtggcggcgaggcgggaggaacgcggtgaggacggcgacgccatgagggcgctcgaggaccggtgccatgacggcggggaggcgcgggaaggccggcgtcggcgtcggcttgttgatggcggcgaggcgggaggaacgtgtcggcgccgggagccggagcggcaggaagcaggtacaggcgcgatggcgacggctcgccaggaccaagcgctgtcgtcgctgggagctggagggggaggagctcgcgggagttgttgaatcgaatgttcgatggcgagcgcgccacgacggggtgatttcgcaagtgttgcgtgaagacggcaggtcggtttatatagagaagggtcgcttgatcagggcgctcgcacgatctctactgcgcgtaaccgaaccggataagtcgcgcgtaacttatccggacttcacgccgtttgcacgcaccggatttttcggaacgtttccaaaacaaaaacgaatccgaatttgtagcaaaacaaaactgcaaaaggaggctgcatctgcgcaagggtgaggagccaatttttcggaccattcgacgcgtacgtcgtgcacgcgcgccgccggcccggcccggcccggcccggcccggcgagcgagcgcgcgcgtgtgtttcccctcttctctccaccacacatgcttcaagtggctaggaggacatcctcccttttaaggaggtccccctctcctagaataagcaaggtggtactaaactccacatgcatgccatcccatgaggtgggcttttgtgattttccaaagaattaatcttcgagtgggctaaggcccattcattaattccaacaatcccccaccaaatctcaaaatcccactgagatttgccttttccaatatactgtttatataccagcggttcgatggagaccaattaaggttgaacatccacctagaactccaagctacacttactcacaacttgaacaatggactacgccttgaattgcaagtcttgtgcaagcaagtttcactcaaagtcttatctgatactagaccgtctgtagactacccctcgggtggagcgtataagtcatactcctaggtctttagtaagcttcctagaagattcacccaaaatcttcatagactgcgaccaacagtcaagctcacaaaggtgagttctttcaaaaatgctctgcaggacaacatcttcgctaattaaagccaacagaactcattaaggcatagccaacctgccttgcagctcacgagagtatatgcatcttcacttggagagggtatatatattggtactctcctttagtttattaatggtttgttcttcccaggatctaattcacgggatctccgatcacataaactgggttaccaccatagtataactcacatgggtctcaaacccatctccttcgatgcattgtctatcacatttcgtgatagtcccttcgtgaagggatctgccaggtttctcgctgtttggatgtaatccaacgttataactccggagtttcttaatttcctgacagacttcaatcgtcttttcacatgtctagacgatttcatattatccttagaactattcactttgacaattaccgtttgattgtcacagttcataaggatagccggcaccggtttttcaacaataggcagatccattaatagatcacgcagccattctgcctcaacagtagcagtatccagtgccgttagctctgcttccatggttgacctcgtcaaaatggtctgtttgcaatacctccatgaaacagcaccaccacccagtgtgaaaacatatccactagtggctttgatctcatccacatcagagatccagttagaatcactataaccctccagtaccgcaggatacccagtatagtgaagccccaattccacagtacctttcagatagcgcattactcgctcaagcgcacgccaatgatcatctcccggattagaggtaaatcggcttaacttgctcacagcaaaggagatatcaggcctagttgcactagccaggtacatcaacaagccaatgatttgggagtattccagttgattcctagcaattctcttgttcttgcgaagcaacaagctaggatcataaggtgttggagaaggcttattatcaatgtagccaaaacgattcaagatcttctccacataatgggactgcaagagtgtaatcccattctcacctctaattagcttaatgtttaagataacatcagctactcccaaatccttcatatcaaaattttgagacaagaatgatttaacctcatttatcacctcaaggtttgtcccaaatatcagtatgtcgtcaacatacaagcacaaaataactccctcacccccaccatggcgatagtacacacatttatctgcctcattgactgcaaagcctgcagatgtcaatgttttgtcaaatttctcatgccattgcttaggagcttgtttcagaccatacaaagacttcaacaatttgcacactttgccttcttgaccttcaactacaaacccatcaggttgatacatatagatctcctcatccagctctccattaagaaaagctgtcttaacgtccatttgatgaacgagaagaccatgtgaggctgctagggaaagtagcacacgaattgtggtcaatctagcaacaggtgagtaagtgtcaaagaaatcttcgccttctttctgagtatagcccttagcaacaagccgagccttgtacttttcaatagtaccgtcaggcctaagcttcttcttgaacacccacttgcaccccacaggtttacacccatagggtcgctctgtcacctcccaagtcccgttagcgataatggaatccatttcactacggacagcctccttccagtagtctgcatcaggagatgcatatgcttctgaaattgacttaggagtgtcatccacgaggtacacagtgaaatcatcaccaaaagacttagccgtcctttgtctcttactccttcgaggagcttcactgacatcctcctcagagacaagttcatgtgtatgttcagtttgttctggtggtgtgattgaactgggaattatttcagagggttggttcgaaccactatgtgtatccttcattgggaaaaagctctcaaagaaggtagcatcacgagactccataattgtaccaacatgcatgtccggtacctcggatttaactattaaaaatctataggcaatgctatgatgagcatatcccagaaaaacacagtccacagtcttaggtccaagtttgcgcttcttcgttattggtacattgactttcgccaagcacccccatgtgcgcaaataagaaagtgatggttttctaccaatccatatctcatatggtgttttgtccttatttctgttaggaactctgtttaacacatgatttgaggtcaacaatgcctccccccaccatgccttaggcagtcccgcggtgtccaacatggcattcaccaagtcagtcagtgtgcggttcttcctttcagcaatcccattagacttgggagaatagggaggcgtcctctcatgtatgatgccatgttcctcacagaataagtcaaactcgttcgagaaaaactctccaccacgatcagacctaagcctttttatctttctgtcaagttgattttcaacttctgccttataaattttaaaatagtctagagcctcgtctttcgttttcaacaagtacacatagcaaaatctagtagcatcatcaatcaatgtcatgaaatatcattttccacccttcgtcaacaccccattcatttcacaaagatctgaatgtaggagttctagtggtgccaagtttctctcatcggtagccttgtgaggcttgcgaggttgcttcgattgcacacaactatggcacttagaacctttgacaatggaaaacttaggaattaaacacatgctggaaagccgagacatcaagccaaaattaatatgacataaacgtgaatgccaaacattagcctcatcatccacactgccacaaatatggttcacagacttattgcagaaatcagaaagggaaaagcggaacaggcctccgcactcataacctttaccaataaaatatccatgtttagacacgactactttattagactcaaaaaccaacttaaatccgtctctagtcagacgggagccactaacaagattcctgtcgatagaagggacatgctgcatgttcttcagctgcacgatcttttccgaagtaaacttcagatctaccgtgccaacaccatgaacagaagcatgtgacccattccccattaggacggtggaaccccgtgcgacctgataagaagaaaacaatgagatgtcagcacaaacatgtacattggccccagtatcaacccaccaattagtagattgattaactgaaaaaacagtaggtaaattaccatacccgcttccatctccagtgttgccaatggtcacattagcagacttagaagtctgccctgcaggtgccttcatccccttgcgctgtggacacttcctagccagatgaccaacttggccacacacaaagcaagtcctctcatcctgattaggattgttgttgttcttcttctgcttcttgaagttggtggtctgctgagctttgtatttccccttgctcttgttctgggccttgtgcacaacattggcactggactgcccaccatcgcccttagacgcggcatctttttcccgagctttctcctcaacatcaagagacgcaatcaacccctcaacggagtattcctgtctcttgtgtttgagtgcagtaccaaaacttctccaagatggaggtagttttgcaataatgcacccagccacaaatttgtcgggtaagacacacttaaggagttcgagttccttagccatggtttgtatctcatgagcctgttcgactacagaacggttgtcagccatcttgtagtcatgaaactgctccatgatatacaaatcattactagcatcagtagtaccgaatttagtattcagtgcatcccacaactccttagcgtcggtcatatgcatatacacctcgaccagacgatcgccaagaacgctaagaatgcatcccacaaagagagtagtggcttcctcgaattgcttctgctgttcagcagtaagaactccttcaggtttgccagtactcacccagaagcatttcatagctgtcagccacagagtgaccctgatctgccatctcttaaaatgcacaccggtgaatttatccggcctcagtgcatcggcaaaaccagccatagtaaaatcacagtgcctataataaggtttttggattgttgagattatagacatataatgatttaatctattccataaataaatcatgacattacagatgaaaactagcatgaacgcatcattagatctatacatgtaaactacacagtataacatgaacagatcaaatatgcgcaacatattgaacacgtaccgaggtgacgtaaagaccggttgcttggttgaaacttttcgcaggtgtctacgaagacacgaaacacgcgagcgaagaggaaggcgagccgtcgcgaacaaacagggagcagtcgcgcgaagcgcttcccaaaaaccttattgccgccttctcccggtgcaggacgtcgaaggcagaggttccggagacctgctctcccgatcgccggtgcacgccggcgagcgggatggagtagtctacgagcgacggcgcagtacagagtaggaggcaaaccccagattgatttcgcaagtgttgcgtgaagacggcaggtcggtttatatagagaagggtcgcttgatcagggcgcccgcacgatctctactgcgcgtaaccgaaccggataagtcgcgcgtaacttatccggactccacgccgtttgcacgcaccggatttttcggaacgtttccaaaacaaaaacgaatccgaatttgcagcaaaacaaaactgcaaaaggaggctgcatctgcgcaagggtgaggagtcaatttttcggaccattcgacgtgtacgtcgtgcacgcgcgccgcctgcccggcccagcgaggcgagcgagcgcgcgcgtgtgtttcccctcttctctccaccacacatgcttcaagtggctaggaggacatcctcccttttaaggagatccccctctcctagaataagcaaggtggtactaaactccacatgcatgccatcccatgaagtgggcttttgtgattttccaaagaattaatcttcgagtgggctaaggcccattcattaattccaacaagaggtacatcgagcactacgagaaggagatggggaagcctgtgttcgccgtcgggccggtctgcctcgtcaacggcgacggcgacgatgtcctgaagcgcggacgccgcggggaagcgggcgctggcgtggctcgatgccgtcgacgagcggcacctgctgctgcacggccgccgtcgccgcagctgttggtatcagctcggcgtcgcatgaacaccacgcgacaggaagccgtcgacctcggcggctgtcgacctcagcggccgtcgaccacgcgaggaggttgctcctagactgcagcgcggcgcggaggtcgatcccaatcccgatcccagcgccactgtgccaccgcaacgcccaccgcggcgactgacgggggagcccgcgcgctgctcctccccccgccacccgcgcgccgccatcccccgccgcccacgcgcagctcctccccccgtcgccagcgcactgtcctctgccgtccgcacgccgccccttccccgccgcctatctgcaactcctcccccgccgccgtctcgtgggactcgtgggtggtggccggcaggggagcccgcgcgccgctcctccccccaccgcccgcgcaccgtcctcaccttccctcccccaccaccacctccaagaaatgctttccccgccggatccccccgcggcgcggtggccggcgtcctcctcctcctccgccgccgcatcgacggtgtgccccactgctccctcccggccgcctccgcggtgtcgtccactcgtccctgcaagtgtgagagctgagagcgagaggaaggaaagagaaacagagaaagagaaaggggaagagagagggtgacgtgggcaccttacatgtggggcccacgtgggtctcacgctgactcagccgccacgttagataaaatcgggatcgaaaccgccgagggatctattgtaaaattttgtatagttgagggaccttgcatatcttggtttgcggtttgaggaagttttcttatctggacgacaagtcgagggacattgagtgtactttttcctttctcccttgattttgtgggccgtttgtcgttaatatggcccattatttgttggccagttcgttggctgggccttggcctgggtcataaggccagtttacctgagtgaaccgcgggcggcgcctgaagagtgaagacaatcggcagtggcgtgacacggctgaaacttcgccggtgactgtttgctttccgcatcgcgtgtagtagtaaaattttggaaagcggacagaatactggtctactgctactggagatggaaaatccgagtaataccgattctgatcagtagaagcggtcaagacacggcagagcaaggcgctagatgtgagtcatgtgacactgctgaagagttgtgatttttgaggccactgtccaggggcccaactgcccaagccggctgtactcgtcgtaggcaaaacatggccacccgctgttcgctctgagtagagaggatatcttcgattcttcattggtagtatgctatgcccaatgccctacgcacaggctcagcggtgttcatcttgtggaaagagatataacatggctgttttattcatattttgcaggtgatatgtgttccaagcaggaacaacccgcgaaactcgccgtgttcgtacaactggtgttgctgctgctatgctatggagttggcaacaatgtcgtcgtgacgtcgtccattgctcaactgtccgcgagaacaacatagatctacaatcgctgattgatttcaagaagggtatcactgaagatccaggaggagtcttgctctcttggaacactaggacccatttctgttggtggaatggtgtcatatgggtggtgtgtggtcataatagtactggacaagtagccgtatagatgaacaaagagcttaatccacataccagttaacatgggatggaacgccacggctattctacataaactccctagcacaattttaaccaaactaaaatcaatttcctaattcaaatttagaatctgaagcggctaatcacgaacgagtaaagaccgatgagatctaggaaccacggaatacctttgggaggcggatggtcgttcgctggcggcgtctcaccgtcttccctccggcgacgcgcgcccgcgcgcgcgcactggcagtggcggatccacggttggggctggttggtgccccagcctcacctctaccctgctcctaattaatcattaacaagtctagttagtcattagtgaagaaatttccagatggcaaggatgcaggctgctgcctcactgcttctactgcccaaactgataaaacaaaacatactccgagtatacataacaacataatcacagatagagaaagtattgggaatattttaatatagccaccaatcaaaatagagaaagttcttttgatcgtggttttcattggaaaatactttagttgatatatctttatttgttttaatcatattatattttttttacactagtaccccacaatttaaatctggattcgccactgctcactgcggaacatcgcgcggcagtgcggataacaggagaagctccagttattcgtgggaagtggccagtggtggcgacgcgtgggcgtggcagactgtgacattatgggcctgtggccttccaatggacctgttcgtgtggtctggttgctgtccttatttgggccatcagctgcaacaggcctcctgagtcctgacggcaaccaaatgtctggactgaattatacctgcatgtttttttttttttgaaaactattacttgcacgttctagttcgacatcaatcgtgacagaagaatgcagagtctagacaggaggaatacgattgctcggacggaaacggcatctagagcgagtagatcacgaccaacaaaattgatctttgtcgttgtagagccgtctcgactttggcctgttctgtattgcggtcaagctacggcaaacgttaagcatatgtcggacaagggaattggataacgaatttacaaccacacgctcagattctaaatctaaacaatctagctttgtacaaaattgcatgaaaaatcagctgaactaatacggccattgcaactgccgttaattgtaggggcgaaaacagtgaccgagccactgtccgactagaccgggcagccatctaggttcgtcggtgaaaactccattaaattttaatattaactaaaaaaacacacatgcgttgcaaacttgcaatatgtgaaagattttttttttacaaaatcatatgctgtaattaggagtacgattgtctcaagttagcatgtaaatttgtttaaagagatttcttatacaactctttctgtatttctaaaagcgtacgaatttaaaaaccgaatcaaatatggatatgtatttccaaaagaaaatagacttcaaaaccaactcaaacacggatgacatactaaagtactgataaaatattttcagtttttataatagtaaagatgagtaaatttatgatgaaatttttataataaataataattatattgaagtttgactgaactcaaaaattttctagctctaccaatgagcacaaagacaaaatatacacttcctttcttatctttcttatgtcactcatcaggatagcattagcataccacccaccctgtttcctgggtgatgtcggtgatctatctcggtatgattcccagtgaccactggccagtagcccagtagtagttggcaagaccccctttcgtgctccgcataaccgagctgtacttctggatgttctccagcacgggaacgcacggtcaccgaccaccattattggcgaacaacctctcgttgcagtttgagcctcctgtacgtacgtgtggctgtgcccattccgaaacactcggggaggtctccaaactgatcacggccaaaatgatctccctcgcgcaacatgggcatccgcacatgcggacggcgagcgccggtttgcgcccgccatgcgtacaatgattgggaacgtacgttcgttgctccccttgccgccggagcaccgcccgacccgtgaatccgtgtcgcgacgagtcgcgaccaactggcgtctgtcgcgtagtgctctcccgtgtacgtacgagtatagtgggccgaatcggcactgtgccgcggtacgcgtaagttgtttattctggtttctccaagattgggattctagcagctttggggtgggtacaacagtgttctgcacttgttctctcgtatattcctacagtacatattctgttctccggtacaatatgtgattcaattgtggggctacttgcacgcggtacacaaaaataataccctgaacaagctgctggggaaatccagagtttggacaatatgttttaggccctgtttaatttcccaaaaaaaaattacaccttgtcagatcgaacggttaaacacctacatgaagtattaaatataggctaaaaaataatttattgcacagattgcgactaatttgcgaggcaaatcttctaaacttaattgttccatgatttgacaatatggtgctacagtaaacatttgctaataatggattaattatgcttaataaattcgtctcacggtttactgatggattatgtaattagttttttttttattagtgtcaaaacaccctatgcaacactttatataatatccgatgtgacacgccaaaattttacaccctaaatctaaacacccccttattcataggtacacctggcataacatgcatacccactagggtactaggtgttcctttttaatgacgatttaatggatcatggacatgtattatgaagctaaaaattatggttgatggattatgtgtgtgttattggtgccacaatttcaaaatcaagatttttatgcgcatgattaaacataagaccttaaaattaaaaccacacataataaaatgtcactacactatcaggtgtgtatcggaagctcagagaccatatccttaattccatttattgatctccagtctccacctaagcctctctaaattcttcattgttgtatacctcgacaggcacatcacgttgaaattgctaatgcgcggctagtcgcgcgcgccctcccgcgcggcgaggcacgtggcgcgcgccgagagggccacggcggcagcgcgtgcgtagggtggggcccgcacgattttcttttttttttccttgttcggtttctcctttccggttttctttccttttttttctttcccttttttccttttcggttttttacatatacgtatacaaactttttatatatatgtatacaaagcttgtatacgtgtatataaagtttgtatacgtatgtataaatcctttgtatacgtcatatataaagtttgtatatgtgtatagaaactttatatacacgttcgtatctaaggtttgtatacttgtatacgtatacacatgatgtgttttttttattatttttaatacgtacatctacaaagtttgcatatttcatatacaaagtttgcacacatcatatacaaagtttatacacattgtatacaaagtttatatatgtgtatatttttttatacataaaaatatatatttgttagtagtagtagtatagtagtcctagtagtaatagtagtatagtagtactactactagtagtaaatactagtagtactagtagtactagtgtactatactagtaacagtagtagggcgacgcgcgcctaccccacgcgcggtcagtcgcgcattaggcgcccgtagggtaatcctaatgggcggtgatcgctcactcccctccccagtgatcacgtgcccctccacctgtactactttacctcccctttttctcttactactacaccataaaaatttaaattaaattcaaatttgaaacgggtatgtaaactttttacttataaactttgggtctataaactaatatttgaatttaaatcaaactttagctgtataaactttagatgtataaaaatactatatatagaaaatatttatatttgaattcaaattcaaatttgaatcggatataattcaaatttaaatttgaatcgggtatgtaaacttttgacttataaactttatgtgtataaactttagatgtatagaaatactgtatataaaaaatatttgaattcaaattcaaatttgaatcggatatacaaacttttgacttactataaactttgggtctctgaactttagatgtgtaaacttgaggtgtataaactttagatgcataaatttactaaaataggaaagtaatgcggtgccaaaaaagaaaaccaggtggagggagggagggggagggggggagcgaattgatcgctatccccgtcgccaggcgagcgatcgcccattagccgtttcgcattacgtagacaccaatctattaagtttggcccaaaataattttatctggccttgtgcaaattaaactatgtatggaagtctaatgacattctttgccttctaacatttttttaatcaagtttatgccttaattaccactaccaataaaataaacagttacacatattcatcaattgaattttttccgttactttttctttcatctccccttctgatgtcctcaattcatcgtgaaacccgtttctagccaggcaggcagcaatgcaaatcatcgtggaactagttaatagctggtgacctcaatttgttttcgcgcgcgaggcagaggcattattctttctactgaagttaccatcacgggctgtcaccgatggttttcttgatctttcgctagctaccgtgtttgctcctcatatggtgcgtaaataactccttccctaggcttattagtccattccaataagttttaattttactcatgaataaatactcatatgctactattttgtcccctcttcatgtgttctttgtttctctggtcttctaactataatctgacacacttcaatttttgcctatatcataaacatatatatatatatcttgctgatttttttatcaatgttcctacggagtaggagtactaccttaatcactgcaaccaataaaatatttttttcagttaattctcgagtaatatatcttgctattttttttatagaaggcctgaaaagcctaatttataagcatggaagtgatgaatgtcatcaatctttctttctaatgacctggctcaaaccaagagcacttggaaacacattacccaatccaaccagcaattagaatttttcaaagttatagaaaaaagttgaaagatatatttaaatcacagctattagttgcacctaatgttcaagtgatgtacaaatttagaacaatatatacgtgtatatagtacaagcagttagatgcatgttacacctaacgtattctatctatcatacagaagtctcgcagcaacacgcgtgatctctcactagttatcctatacaatccattgcaccaaggtatgacaaaactactccctccgttttagactataagtcgttttgactttggttaaagtcaaacaactctaaatttgactaaatttgcaggaaaaagtagtaacatttttaacccaagacaaatatattataaaaatatacccaattatagatttaatgaaactaattaggtattgtacaatattacttccaaacttgataaaacttagagtgtttgactttgaccagagtcaaaacgacttataatctgaaacagagggagtacataggtaaagattttgtattgtaactcacggtgaatcttatactccctctgtcccaaaatataaccatttttagcatagtgtcaagtcaactatttttaactttgactattaataaaaaaaataaaaaaatatcaatcatgtgaaattgatgttactagatttatcattaattaaactataataatataccattctttttatttaaaacaccttatttttatagatattattggtcaaaatagcatctcgaaaactgtgtcgagtctaaaaatacttatattttgggacggagagagtaagttttttatttcatctttttttctaaagaaaacaaacccatgatcctcctacggctgccaagttcattgcggtggcaaaagcactccttatggtgcccggccacgttatgttgcagcgatggcatatggcacgatggtagtgttcgagcacatcatgaacgttgctttgggggaatggtctacttggtggatttcagtttcaatgcgtgcttaagcgtggtttgcgccaatacgataacacatattttgtgctatgctttgttttatttcgtcaaggaacgagatgatgcattggatcggagatgaaataggatggggttgaacaactttcattctgatgtttaatttatagttcggtttagcctttttttgctaactggtttttctcaatttagaaataagttacaataacctatcacttcataagatattttataaaactgcattaatagcaaacaattttatcagaaagcttatactagtaactagtgtatatatccctgtatatatgtgtatatgacacatgtgcctaacttgcagaagcatgcatgaatattgcatatgtaacatgtaggtccaaacttgtaaaaagaagatgtggtcctatgataaatactgttgcttgtttgaaatgtcttgcaacaaattgatagttttgatgaaatagttgtagttttctaaaattttgacctaaatttcctctgtagtgaatggttttggcatggcagaagctaactaaaatttgcatatttggacacatattatttgatattttagattaatataataaacattgaatccatgaggatggtggggtggacaccagcatacctaagaaaataaaaaagaagttatggtataaactatgtatcaatggcccaaaagatttgatgggatactgcacaaactgaactacaagaggcacgaaccagctttgtgggcataatagcaagaagaaaaataaatattaggcaaaatataaaaagaaaaatattaggcagatttcacgagaaaaaaagcaaaaatattcggccttaaattttcgaattaacttggtctaattttttttttgctaccattatatatggcttatgatggtttaaaaaaacgtgaatattaaggaaagacctaatatcaaataaatataagaggtgatgtttcgaatctataccaactagtccactaccttgtgaagctagccagaagatctctgggcgtttctctgtcttacgatggttaacacatcgtcgtcatggcaccaaaattagctagacaatgtttgctctagtcactcgaaattattatcctaatagagaaaaaaaagaaagcattatatcgtgtgatataaatagttcatattacaatctggttgatcgatttatataattgtatataagatgtgattgtacttaatttagttagcataatttacatgatactatctactacctaaaatagatcttaacacgcatttgcacatgccacgctgctagttaaagtgatacaataacaaaaatatttcttgtagtgtaacacttaattgaattcaatctccaacttgattgtgaagtacaaaaccataggtccagagtagtgaaagcaatataagggacttggaaaaaaaaaaccaccctcgaaaacgtttgctctagtcactcaaaattattatcttaatagagcaaaaaagaaagcattatatcgtgtgatataaataattcatattacaatctgatagatcaatctatatataattgtatataagatatgattgtacttaatttagttagcataatttgcatgatactacctactacctaaaatagatcttaccacgcatttgcacaggccacgctgctagttaaactgatacaataacaaaggtatttcttgtagtgtaacacttaattgaattcaatctccaacttgactgtgaagtacaaaaccagagatccagagtagggagagcaatataagggacttggaaaaaaaaaccattctctcgccttttcttctcctgtcattaatatgaacttgatttttataaatgtgatgaactacgccaagactatgcacgcaactatttccagacatctggtattgatttcatattcaaaccaacgtgctttcgacctgttcattgggttggtggtcacggctgatatttcaccacttcctgagatattcatataatcagtatggtgacatagccgtggatgacacggcattcgtatgtagcactgctatccaaatcgaatacatacaagtttgctagacccgctgctctgtcaacgaacgaatcctgaccgcagaaacaaattctggaagaaccaaaatgaatttgtggaacgagaatcttgaaaggtaaaccgttcatgtgctcaaagcttatctgcatacaagccttcgagaccggtcgcggctgtcgcatatcagcgcagaatttctctgtccggttccggctgaaaagtagggggatagatgaatagtacggccatcggattcgaggttcgagctggacatgccgcaacaaccttgtccagatcaaacagggacagcagcgtttggtgatgagccgacgaggtgaaaagttgcagtaactggcaggtttgacggactccaggtcttgcctctagtggcggtcaagctgagataaggagtgacaattaagtgagtggatgcgacaatgctgtaaaaccgtttttaaacccccgggacctgggaggctgctgagcaaagttcagagttcacaaaccaccacacccagcggcaccatagacaccaagcagaacaggctgctgagctccggccgaccgaaggtgctccattctctctcctcatcattattgatatttgcaggatcgatcacttgaggtaaatcatagaagctcaaagtgaagtgcgaatatttttgaaaaattgagttttgttctgcttttaagctttgaaaagtcagatgtgttcgtggatgatcacataagcgaccatttgcctcgatcggttagcataggcagcatgccataatgttcatggttgtatatttttgcaggtaacatgggcctcacgtgtgatacacaaactgcaaaactggccattatactactagcattcatactgctatgtcatgggattggcaacgtcgattgccgtgggaacagagccgatcagctctcactgcttgatttcaagaagggcatcaccaacgatccatatggagccttggccacttggaacaccagcacacatttctgtaggtggcaaggtgtcaagtgcacctccactgggccatggcgcgtcatggcgctcaatctctccagccaaagtttgacaggccaaataaggtcctctctcggaaacctatccttccttaatatacttgacctcggcgataataacttacttggctccttacctcgccttggcaatcttaagcaacttcaggcactctatctgtataaaaacaatttgacagggataattcctgatgaacttacaaattgttccagcttaacgtacatagacctctcaggaaatgccctaactggtgcacttcctccaaatttaggctctctgtccaatctagcttatctttatctttctgcgaacaagctaactggaaccatcccgcaggcccttggcaacatcaccaccttggtagaaatctatcttgatacaaatcgattcgaagggggcattccagacaagctttggcaattgccgaacttgacaattttggccctaggtcaaaacatgctatcgggtgatatcccatttaacttctccagcctttctcttcaacttttaagcttggaatacaatatgttcggcaaggtattgccacaaaacattagtgatatggtacctaatctccaaattcttcgcttggattacaatatgttccaaggtcaaatcccatcttctctaggaaatgctttgcagctaacagaaataagtatggcaaacaactacttcaccgggcaaattcctagctctttcggaaagctttctaaactctcctatattagtctcgaaaataatagcctagaggcttctgatggccaaggctgggagttcctacacgcgttgagaaactgtagtaatctagaactgttgtcactggctcaaaatcagctacaaggagaaataccgaattcaattggggaccttccgctcaaacttcaacagctagtgctgagtgaaaataagctatcaggagaagttccagcaagcataggaaaccttcagggcctgtttaggttaagtctagatttgaacaatcttactggcaaaatagatgagtgggttccaaagcttacaaaactgcaaaaattacttctccacaggaacaactttagcgggtcgattccatcgtctatagcagagcttcctcgtttgtcaacgctttcactagcatataatgcatttgatggtcccataccatcctcattgggaaacctttcaggactccagaagttatatctaagtcataataatctcgaaggtgtcatacctccagagcttagttaccttaaacaactaataaatctaagtttatcagaaaacaagcttactggggagatccctggcactttgagccagtgtaaagacctggcaaacatccaaatgggcaataacttccttactggcaatatcccagtaacttttggcgacctaaagagcctgggcgtactcaatctttcccataacagcttgtcgggcacaattccgactacactaaatgatctaccagtcatgagcaaactggacctttcatacaatcgtctccaaggaaaaataccaatgactggaatatttgcaaatcctactgttgtttcggtccagggaaacataggactatgtggaggagtgatggatctccgtatgcccccatgccaagttgtttcccagagaagaaaaacacagtactatttgattagagtattgatccctatatttggcttcatgtcactcatattagtggtctacttcttacttcttgagaagatgaagccaagagaaaaatatatatcctcgcaatcttttggtgagaatttccttaaagtctcatataatgatctagctcaagccacaagaaacttctcggaggctaaccttattggcaaaggaagctatggtacggtgtacagaggtaagttgaaggaatgtaagttggaagtagccgtgaaggtttttgaccttgagatgcgaggtgccgaaagaagcttcatatcggaatgtgaagctctcagaagcattcaacatagaaatcttcttccaatcataactgcatgctcgaccgtggacagtacgggcaacgttttcaaagctttagtttacgagtacatgcctaatggcaacttggacacttggatacatgacaaagagggtgggaaagctcccggacgtttgggtttaagacaaacaattagcatatgtgttaacatagccgatgcactggactatttacaccatgaatgcggaagaacaactatccattgtgatttgaaacccagcaatatacttttagctgatgacatgaatgctcttttgggagattttggcattgcaagattttatatcgactcttggtcgacatcaacaggttcgaatagtacagtcggtgttaagggtaccatagggtatattcctccaggtaattaatatggctacttctgagttcagtttcagcttttgttatagacagctaaatagataactgtactttctcttcatacctatgtagagtacgcgggaggtggtcatccatctacttctggggatgtttatagtttcgggatagtgatcctggagcttataacaggaaaaagaccgactgatcctatgttcaaagacggactcgacattatcagctttgtcgagagtaactttccacaccagatatttcaagtgattgatgctcgactcgcagaaaagtccatggactccaatcaaacaaatatgacactggaaaatgctgtccaccagtgcttgatatctctgctacaacttgcgctttcttgtacgcgcaaattaccaagtgatcgcatgaacatgaaacaaatagccaacaagatgcattcaatcaagacgacatatgttggattggaagctaagaaatatggtccggcatgtaatgaacaagatgcatgaaaccccacgcgttattacaggcgaccctgagtcgcgcacaacaattgcaacatattgataagtgtatagtccaacaagaagaaaatggttcttgtgtgttagaagttaagataattaaggtgataatatgaagcaccaaagcgtaccttctaacggtgataatatgaagattggtgattgtgactttatgtcatggtttatttataacaatatattacttcaataatgtaatagtatatgtatacgtagataatgatgttgtacctagcatgatcttgtattatatgcaagttgaactaataaaaaaccatttctgcaggcacccctgctttattttcataaacgatccaaaagaaaaccagcttgtaaaaatgtgaagagaatcctctgtcaggacttataagaaaaccggttttcataggtggacacttaagccgcacacatgtgaaaatgacctcaatttcacatgcaggtagcttaagtgtacatcgtagcattttcacaggtgagcggcttaatctacttacctgtgaaaatcagttttccaaaaaaaaaaacatatctacacctaacttttttcatataaagtgcgatgaatataagctttatgtcaaacttgtacatcttgacgaggtttacaactttataaatgacaactttttcatttgagattatttagaggtccaaaaagttacgacaagatcttatagatctatttttataaatctcaaatctatatttcaaacgacctccaatgagggatgtcgagctcaaccagacctacaacttcgtaagtgatgatattttcatttaagatcatttagaagatcaaatgagcatttcaagtttcggggaggtgaagtcaaaagaatagcatcttaattcaaaacaagtacttgaaaatgagatggtaaaatggatgtgtgtggactatgaggtctcgagtccaaatcctatacaccataagctcgtatatatttcatcaaaaaaaagtggtgtagctaatcaaaatatgaaagcttgatttttcacgtacgggctggccaaccacttgtgaaaatccccattttcacatacatttgctcacaagcggcttgttttgctgcttggaaaatgcgttttagcggtatgagaaaatcgtttatgtagtagtgttatatgtatatgatgtatgccctagctttataataactggctaaaattccaaaactcgtgtttcaacaaaagatctgtatttgttaaacaactttgatgcatatgattgaagctattctctcaaaattatttttctctcatatggttgaagatatggagattcactagagctagttttcgaatcatgtgatagcaaattggccatcaagcagagtcatcttttccatcctactatcaaagaaagagatcatatagcagcatctaatctatttgttgaaagtagcatttatagatgcatctgcggaattagccacaaatttttcaaaattaggggatatatcattggacttggaatttacctcttcggagacaatgattcaaggtagcattgctttgttttggaaacgctttggcggattttgaaggccattttttgcttctcaatatcttgttgttcctccttggtcaaatcctccatggtaagaggaatgacattgcttggatctacctccttgggcttgctcatgatgttgatgtagacttccctagcggagtcgccaaatatcgtgttgacaccattttcggtcaccactataatcggtcaccaagccttgcggagttgtggtgttacggaatcgccaaacaccttgatcttgagaagctccttaccaaggtgggtttagatatcaaaaccagttaacagagccgattaaaacaaattaggttaaacacctgtctcgtggctagaacgaaatgtttttcagaacaaactgtttgcgtcttttccaaccaacatgaactcacctaaagatttacaatgttaaccgagttgccaaccacctcgatcaagaaaatctctcgaccaagatgggtttataaaaggttaaactggctacagagccgatttagagatcaaaccaacctctgggcctatttagatctattttgaaggtaaacacccatctcgtaggtaaattggaaggtatttgtcaatgttacggataagccatacctcctatacttggattcatgacatacgaaaataccgcacacctaatattatacagaaaggtatattcaaatataggaataaagcgagtctaagaaaattgcttccatggggatagaagacatgagagtctgacccggaggaggcaaggtttccttggctcgtgtcttacaagggttatttgagttctacttggagaggaagacgcctagccgtacaaatacaccggtgttaacagcaaaatttggtaatttcagttagtcaagatcaggtcaaaggaagaattcacgtcgtgattttagaatatttggctgacaaatttatccaagattgggtaagcttcggagttaaggaaggtgtatcgtagtttctattttcgttaatagagttctgaaccaatggagtcgtgtcagaatcggactaagatatgtttaagtaatggttagccgatataagtcttgtcgtagttggagtctataatagtctccttaattagagatggagttctagatcaatttgatcgtgatagagtcggacttagtattgcctatgggtatagatatgtatacccagggtctttgtaaacaacaatagttcaatgtacaactttcgacgcatcggcaccctagttttactcgcgacgagttcttgttttggaatttgggctacatcggtctcgatctccagcaagaaagtaagttccatcaaaatccttcctttgcatcagcgagaaattagtacttcctcggttaggtcccatatactagttgctctttttgcttgcgtttcttatcggatatattggctgttgctatgatttgctttgctttctgagtttagatatactagttctcattttgcttgtattttttatcggatatatatgctcttgctctgatttgttctgctttctgagtttagggtttctatatcaatcactctgaaaagtgttcatcggctagtttaaatctatcaagcacttgtgatacgacccaagtagggatggtatcccgatcttcacggtgtaggatcaagaaccgatagctagtctcaaagagaccaagataactagctgcaaggagccaagataatagtacaacctgacgatcgtactcgaagccaaccaccatctctattacggcaacctaaatcgagggttcgcccaactacactctaagttaccaaccaacacaacctggaatcaatcaaggaaaaacctcgaagggaccaggagcaccaattggggggcgttgaacgccacttctataatctcacaaggaaatcacaagagcaaagggatagagatctctctctgaatttgttagcacacagctgaacaaaaggggttcatattctcattgtcaaaagtctccaaaatgataaaacataggggatatttatattaggaacaaccctcctagatgggaatgaaaggtcttgggagtttactggacataggctagctcaaatgtcacaataagtgaattcccgagaagactcgcgcgtctatttggcttctgagcagtcctcaatgatttgtccattactccttattgggaagtcgaaatgacgagccgtttgttggaggtgaaactagacttaattatctttccaaccatatatattaagcatggagaaagttgactggctgggtcacacatcccttggaagttggagcaaatgtttggagacagtgtactccaaaatcagcatacgtaaatggtcgtcgtcattacgtaacccatcattactttgatcttctagctcgtcgccgatgcccagcaagtcttgtgcatgtgtaaacctaagtaatagcaaagtacttatttaggtagtatataattcgcatcaatattgaaatatgtttcagctaggagcgagttcacctcttgttgtagtttctttgcacggctacgtgtgatcggtccttgaaatggtgtaacggattgtctctcatcagcggctaagtcagatgattgtcttgagtgttcatgtgacagggctggggcacatcatcctcccccctcttgaaaaggagtcgttctcgactctgtttcatcaaaaccataatagggtaagatcggcaacattgaatgacgcacttacaccatattcgcctggaagatcgattttgtatgcattgttattgattttggcgaacactttgaatggcccatctcctcgtggcatcaattttgatttgtgtctttctagaaatcgtttcttacgtagatgaacccaaacaagatatccgggttcatagaccactttctttctatgcttgttcacctttccagcattactgcgcaccttcttttcaatttcttcattagtcttttcatgaatcttcttcacatatgcagcacgctttgaagcatccatgttagttctttcctgcaatagaagaggtaacaaatcgattggtgcagtaggtttgaactcataaacattttcaagtggacacatgtttggattaatttttctaattttcaatggacggttccaggagatttcatggtcttcaaacaatattttaagtagattggaggaaaggggataacacaagaatataaggaactttttggaatgattgggatttggacttatttaaattaatttggaaaaggtaaagatagtaacggaggggatatttgaattttgagttattatttggatcctcttaatgtttaaggaaaaattattgtactagagtctctatccatgttttggacaaggtggatatggaataggatataacaagagatttcgaaggagtatttggagggattatgaatttatgataatacaaggaactcaaaggatggaaggtcacttatattttttttattcgaggttatgtttggatcatgaatgaatttgaataattttgaatcgacggagaactaaggatttcaaaggaggatttgatttcgaactccaatagtatgtttgggaagggttctcggggattaatgttcattacaaggatcggtttaattgagatctctggcattagatactaaatacacgcaaagaaccaatttttttcgaacaaaggattttattaaaatagttttttaatggttacacggaaattgggatgttgcaattttttaaaccatcaccttcctaaaaaagcaaatatgatacgatatcctgattactcacgggtgaaatgttacaataatatctgtacgcttgcggatttatctgtgatcgtaataaatacaaacaataaatctcgcagtctgcctcggtgagtctgcctcggtgagctagagcaaacgtttgttaatgggaagaacaactaaacaaacattgattagcccttttccgaactccgcaagatgcatgaatcatgacgcgaaaaatcgacggctcactgacgaatccaaaaatatcctgcggctgcgaaatagcaatgttatatatgtttatgttatttttcagcgagcaagattagcaattgccaaaggctagccaatattacaattttaattttttttctagaaaaaacacatcaatgacgggttacaaatatacgctaccatgggtaagcctccctggtgatggattgcaactcaagtacatcgccgataagcatccgtgatcactactacaaaaatgattttcgcaagcaaagccagtgaagattttcgctggcagtgcgatccaagtgcgaaaatcgattttcacaggtggacccttaagagaaccgtttgcaaaaattaattttatcaggtgtacccataagaggaccaccagcaaaaaaaaaatgccaaaaaaattaatcaacatccagaccgccagcaaaaagatttttttttgtcaaaaaattaatcaacatccagagctacaatttcaaatccaatccaatccaaattcaatcaattcaaatccacatcagatccatactcaaacccacctctagagaacaccacatcaatttttcactccatttcaacaagcaaacgtcaatacatgcagcagatgaaaccgtcgaccatcgccctgccaattgttaccgtcaccctgccgattgttatcgtcgtagcgctgccgtgctggtagttgtcagtggagtgggagagggaggacttagctggatttgcgccctaggtcaccgcccgccaccgaatcaaccacctacgcctcgagatgggaggacttagctggatttgcgccctagatcaccgccttccaccggatcaaccgcctgcgccccgagctccaccgcccacgcccgaacccgccacccgtgcccgaaactactgccgacggctggatctgtgggccgtgcccggagcaaccgccacgcacaacccgagccgccacccatgccccaaggtgtcgccggccgaatccatggcctacaaccgagccgccgcatgtgccccgagctgcgtcgcaggatccgtcgccacgctccaagctgctgccggccggatccatcgctcgtgcggccgcgcctcgagctccgccgccggccaaatcctgttagataatgtagtgtgcgtgtgtaatcttatcatgtaatcctgagttggtttggtgcggctgaggaggagtagttagctgtaactaatcattagttgttgtatcttatctagattacatctcctccttagtagcaactgaacttaacaaccctgtaatctcctagccggttgatggctctatttaacacgcacacgcggccctcacgagggtatcacgcttcctcattcattcactcgtttctacatggtatcagagcaataaggctcttagatcgatctgctatggcgagctcatcctcgactacagccgtgaatccgctgatcggccttcaggtccctgaaaggctgaacaagcagaatcacgcgatctggcaggcgcaagtccttgccaccctccgaggtgcgcggcttgagcactacatcaccggcgaagctgctccgccggtcgccgaactcgtcaccaccgacaaagatggcaagacgaagacgacggcaaaccctgcatatgaatcctggctggccacagaccagcaggttcttgggtacctgttctcctccttatccaaggaggtgatgacacaagttgctgcatcaaggaatgcagcgcaggcctggagggccattgaggagatgttttcttctcagacacgagcgcgcgccatcaacgtgcgactcgcacttaccacaatgcagaaaggtacgtcttccattgcggaatactttgggaagatgaagagcttaggagatgaatttgctgcctctggaaaaccactggacgatgatgatatggtcgcctacatagtaaatgggttagatgaagattacaattcagttgtctctgctcttgttactaggatagaaccaattactgtttctgagttgtatgcccagcttttaaactttgaaagtagattggaactccaacgtgtaagatcaacgtgtgttttgattcttattctgtgatgaacaattggcatctgtgattattggttttgatatttggagattattgtcgaagtggttttggagataatcaattttcaggtgatgatcggatttgctgttattttatgtggtccggtccgaccgggcggaggttgccggtgtcacgcccggaatttctatccaaaattccaaacgcttacatgtgtgtgaaccctcgtccaggaatcagccgaggcacacaataacaaattgataatagagtacaattattactctaattaataaacgtataaaatgtcattacagaggtagatagttcctctcaatcaataaagatctaagcagcggaaaataaaataaacggcacggacggctctactccacaggcaacttgaccaaggctacacctaatcctccactccatcagcttcactgtagaactcttcctctgatgaatgattgcaaggtgagtatatgacatactcagcaagccacgcagcaaatatgcaagtgcacaggataacaaaggatggcataatagggttccatttgcaaaaacagcatttagcaaacatttgagaattttaataaaacagttgagtaatagttaaacaatattaatccaacgctatacaacataccctgttgtataggcccaaccatactgaacaaccatcccggctgcacagttctatctccaaaccaggaatataccattccaaaccaggagctaaacaaattattaccagttatagcatcatttactatggtgagaagggtgagactaatcacgaaagacattgttagacccgcccataaccgcgggcacggctattcgaatagttttactctgatcagaggtgtaccactgtacccacaagacacaaccccacatcatgtcaccatgtgcctcaataccaccacggtacctcggaaaggagttgtgacaatacccctcgtacaacacaatccactgcagcgcaccttcctggatcataatcacccccttataaacaaggcatggactccccagcgacccccgtgggcttatctccgccacttctcagtctggtgccccgcaatgaaccatgctatacaaaagataaagccgttgcccatgctggcttgtggttggcacgattaatgtttcacaaccgaaactcgtgaaccggtccttaattgtcatgagcacgaccatcaaaaccatgtgctcacaacccaccattaccaggttttagttggcacattaattaattaactaatcacgattaaccatcgtgaactatcaataaaccatcatgaaataatagtgagtcattagttatcccataagtgtgctaatgtttctaaacagggctaagcaattatatctaatatctagttgaaccaatataaataaagctcaactagtcaaattattataacccaaggtatcaaggaataaggtaatcaagaacaaaagggctataacaaacaataggttaattccacccaatgacattcgaaaataaatgcaatagttgaaaagaaacaatagctttaaataggatcaacatgctcaaagggttgtttgggatctgtgtgacttgccttgctggccttggaactcttcaaactcttctccgacgaaaacggactctccggaaacgacggaatctaagcagaaaagagcaaaatcaccaaaacagcacataaacaagcatgaacaatatatgtggatatttttaatgtgtagatctcaattttagaaaaatttagagacttgaaccaactaaatcggagctaagatgaattagttatgaatttttaaagattaaaccggattaaaacacttatatcggtttaaattgaattatgacgcaataatgaattatttttgaaaaggaaaagatggtttattgcgtcagcgggctagggtttcggtggaccgggcgcacgggcggcggttcacgcgaacggacggccgagattgatccaaaccaaaacggacggccgagatcgatcgggtccacggcggttcacgggagacgactccgatgacgtcagcgatgacgtcaccgacagcggcggcggctcggcggaggagacggctcgaacggcgcacgctcgccggcgaacggcggcactaggacgcaaacggagggcaccagcacgtagaggacgacgcggcgaactcaccggtgaccacaacggcggcggaggaggaacggacgacgacggcgacgaggaggaagcggcggcaaccttcgggtcgacggtgacggcgatgctccggcggtcttcggcggtggcgaagcagcggacgaggacggcgacgacttggcgagcacgacggtggtcttcccgagcgacggcgacggctgaaacgacggcggcgcacggctggagcggcggcggcgacggcaaagctagggcacacggcgctagaacgattccgacgacgagaggcgaaggcgagggtggcggcgggtagaggagacaccgggggtccttttaaaggggctcggaggcggcggcaaaggcccacggcgacggcaacggcgaaggaaacctcggcttggagagagggaaaccgatccgaatcgacctcgaatcaaactcattccagaccgatttagccgaagattccaaaggagaaaaggtagaggagatcccggagattgtttcccctcaaacaattcggccggagaaggaaagggacggccggatttggaaggaaacggcggcggcggcgcgctagggtttcgggcggcggcggccgaaggttgacgaagggcctgacaggtcggacccacctgtcagcgaccgaacgcgcgcgcgcgcggctgcggactgggccggactgggccgaggagagagagcggttttgggccgactttcggcccaaagccaaaagagactttttaaaacctttttcaatttaaattatttcttaaatgcaattccatttattaaaaatacttccttagctcaaataaatcccagaaaaatctaggaaatatagaattaagcaaagtatttaatgaaattttatctggccccattttatattggaatttattaattaaaattagatcttcttttcaagacttttaaaattatttctaaaaattccaattaaacaacaatttataaattttgaattttcagggtgtgacagccggtcagaccggcttgtgttgagcggtcagaccggccggcccgcggtctgaccggccgatgctgtatcggttttggtttcgggttgtttctttggatatccgtgattgtttcatggttatggcttctagatggatactatacgtatgtaatactgttgtttgctaacaatgagtcaagttggagatagcttggtctcggaatatggtttctttgtttgtttcatgtgtaggtgactcgatgcctcgggagagtatttgcggtgatggaccgggagtcggcttggtggtaagacgatgtccgtggtggtcagatatcatgcgggatactaaggctagagttgatgcacgtggttgatggagattccatatggcatacgatggaggtattgtgtgcgtatgggatgcggagtcgaatttggaaggagtccaaatttggtacgattggttatgtaaagtttctttcttgtactagaaggtttcctaaggtgtttaggactcttagtatgagtttggttcgtggctttaggctgcctacctcatgtataaatagagggggagcatgaggcttcccggtatcgcttttgagagcaattgagttgctagtttagctagggtttcgagtttagtcgagatttttgtaaggagtgctgttggtgcactttgtaaacacagagagaagcaataaagttgttatctactttgagagttcttcagtttgtgtttcaccgggtttcggcggtccaaccggcgatataccggcggtcagaccagtggcaagcggcggtcagaccggcggcatacgagcggtcagaccggcggcggcagcaggcacgacaggcgacttcggcggttcgaccgatcgatctacatcggtcaaaccgacgtgttccaggcggtcagaccggcgcgacaacttcgatcagaccgcggtccatcgaattcgagggtaacttttatttccgctaaaagtttttggttttggggtatctcaaccattcacccccctcctctggttggcttagttcttgtgattcgatcatacacaacgtaagggctcctactcatttgtgaatacggtgagcaaagggggccgtggtggcggcttcaaccgtggtcgcggtggtgcgaaccacggtcgcggaaagggacgcggcaatgcgccgcaaaattctggaggaggacgcggtaacaagccgcgctgtcagctgtgtttcaaagtcggccatgtggtggccgactgctggcataggtacgaggaggacttcgtgcctgatgagaagttcgtggcagcagcgacgagctcctacggtgtggactcaaactggtacattggtaccggtgcaacagatcacatcacaagtgatctagacaagctcatcattcgggagaaatacaagggcaatgatcaagttcacactgcaagtggcgcaggtatggctattagtcatgttggtcagtccattattaaaacccctgttcgaaatctttagttgaacaatgtcctacatgttcctgaaaccacaaaagatttgatttctgctcataaacttgctcacgataatttagcttatgttgaacttcatccaaaattcttttatgtaaaggaccgagccacgaagatacctctacttagaggaagatgccaccaaggcctttaccctgttccaccttccaagtcttcatccagaataaagcaagtctgtggtgctgtgaaaccttcctatgagagatggcatagccggcttggccacccgtcacccgtagtcgttgctagtaataatcttccatgtttaagtcagtcaaacaaagagtctgtttgtgatgcctgtcaaaagactaagagtcatcaattaccttattctgagtccattcataagtctgagtatcctttgcaatgggtgttttctgatgtatggggtgctgccccagaatctgcagggagatacaagtattatgttagttttattgatgattttagtaaattcacttggatttatttattaaagttcaagtctgaagttttcagtaaatttcttgaatttcaagctcttgttgaacgcttgtttaataggaagattattactatgcaaaccgactggggtggcgagtaccaaaagctccacaatttttttgcccaagccggcatcacacatcacatctcatgtccccatacacaccaacaaaatggttcagccgaacgtaaacatcgccacatagtggaagtaggacttgccctactagcttttgcaagtatgccattaaagttctgggatgaagcctttttggcagccacatatcttataaaccgtatacctagtaaagttatcgactttgctacacccctagaaaagttactccaacaaaaaccagactattcctctatgcgcatttttggatgtgcatgttgtccaaaccttagaccttataatgtttacaagctccaatttcggtctaaacaatgtgttttccttggctatagcaactttcataaggggtttaagtgtcttgatgtggctgccggccgtgtctacatctctcgcgatgtcatctttgatgaaacggtgttttcctttgctaatcttaatcctaatgccggtgcaaaactccgttctgaaatcctgctacttccatctcaccttcggaattttcagcctgctgatcatgggggtgacaatgtgactgatcaacagactaattcagccagtactgctaatgccgctaatgatttttctggtgcaaatggaagcaataatgcaggatctggagctgcaagcgatgatgggcatgacgagctggagattggcaggaatgacacggcctccgatgacactgatcctgatgatgcaggtactgtcagtcctagcagcaacagaatggaggcgcagacgcaggaggatggcgatgggacttcattctcttcgccgagccaaccccgtgcagccacgtcgccaacacaaggcgcgggtgcgtctgccagtatgcagtcgcccggagcaacgggcccgtcctcggcagcagatgggcagagcacgggatctgctgtgccggcgcctccgacggtagaagatgtgatcagacccagatcaacccgcttacagagtgggattcaaaaaaaaaggtatacactgatggcactgttagatacaagcatgctggtcttactgcttgtggagaaccacaaaatttagatgaagctttaagaaatcaaaattagaagcttgcaatggatgcagaatatatggcactaatgaaaaatgagacatggcacctagttccttcatctaaaggccaaaacattatagattgtaaatgggtctatgagattaaaaggaaagccgatgaaagtttagatagatacaaggctagattagtagcaaagcgatttaaacagagatatgacatagactatgaggatatttttagtccagtggtcaaggcagccactataagaatagccttatctctggcaatgtctagagggtggtctctacgtcagttagatgtgcagaatgctttcctgcatgggcttttagaggaagaagtctatatgaaacagccacctgaatatgaaaataaggctatgtctaatcatgtatgcaagctagataaggcactgtatgggttgaagcaagcacctagagcctggtattctcgccttagtgctagttatgtgagcttggatttacagcttcaaaggcagatacatcattgttcttctataacaagggttctgttacagtatttgtgcttatttatgttgatgatattatagttgctagctcaaccccagacgctacttcagctttgctaaatgatcctaagaaggattttgccttgaaagatttaggagacttacattatttcttgggaatagaagttttcacaagaacaagaatggtattctgttaacacaggagaagtatgctgctgatgtgttgaaaagagtgggaatggaagactgcaaacctgtaagtactcctttgtctactagtgagaaattgtctatcaatgaaggtacagttcttggagaaaatgatgcaacgcattatagaagtattgttggtgcattacagtatcttacattgactagaccagatatttccttctctgttaacaaagtgtgtcagttcttgcatacaccaactacagttcattgggcagcagtaaaaagaattcttagatatctgaaacatacagttgatcttggtctcaagataagtagatcttcttcactgttggtcagtggatattcagatgctgattgggcaggatgcttagatgacagacgttccactggtggctttgctgtgtttttgggaacaaatctggtatcatggagtgctcacaaacaagccacagtgtctcgctcaagtacagaatctgaatataaggctttagctaatgcaactgctgaaattatgtgggtacagtctgttttataggaacttggagtccaagcacccaaggcttcccgactatggtgtgataatcttggagcgacttatctatcgtcgaatccagtgtttcatgcaagaaccaagtacattgagatagattttcattttgtacgggaacgggtatctcaaagattgctagagattgcatttgttcctacgcaagatcaagtagcagatggtctgacaaaaccactgccgctgcaattgcttgaaaagttcagatacaatctagacctagaaaggttaagattgagggaggatgttagataatgtagtgtgcgtgtgtaatcttatcatgtaatcctgagttggtttggtgcggctgaggaggagtagttagctgtaactaatcattagttgttgtatcttatctagattacatctcctccttagtagcaactgaacttaacaaccttgtaatctcctagccggttgatggctctatttaacacgcacacgcggccctcacgagggtatcacgcttcctcattcattcactcgtttctacagatccatccctcgcacggccgcgcctcgagcccccctaccggccggatccgtcccccacgcagggccggtcctgggtttttttgggacccagggcaaaaacttatatggaggcccatatatatacataaactaatatatatatttatataatcatataaacacacaacatttaatattcgatgtgataaaattatctacatataatattttaaaacttcaaagagaaataaatagcggtagcgagcagagaaggcgatcggcggacgatcgacacgagcgtggctactggtgagccacgatttgctgacttgctgtttccgtttgtgagatgccgagaagtcgagaagtcaccgagagcgcaggagcagcgagcgacgtgacgtgatcgaggcggcacgacgcaagtggcgtgatgtgatcgaggtgaagcgacgggaatcatatgaagatcgcttcggcttcgctgaaataggtctcgatggactaaaattcattttctatattgggctatttagctctctaacttaatataaacctatggcccatgaactaaaattatacggtacgtagtatatatactatatgtttatatagagggcccctagattttggggcctcgggcggccgcacggcctgacccccctagggccggccctgcccccacgtgccgcatctacagctcccctaccggtcagatctgggagatgttgagggagaggtggagaagagagttggatccatcccctacatcgtcgccgcctgtgtccttccctacagcgcggctacccagtgctgccgccggagggagggaagggccgggttgccgtcgccactccctgcaacacggctgcccagttgtcatggccacgcgctggactggccgcgccaccgcctcccctgcgtgctgccgcctccctagccatgtcaccgctgccagcacgccgcctccaaagttgtcgagaaagagagagagaagagaggggttggatatggggagccgagaaaaaaaacagagagagctgaaaattttacttccgcgttgtatttaatctctcccgcgattttcgcaggcggtggcttcggtggccgccagcaagaatggatacatcttcgttagagagtttaatagtatagccaactacgggcttcaaattatttatgattcatctaataaactattcatataatagttaactataaaaatatactacaccattaatacccggtcctacctctgatacacacgtaatgtattgaagtccgtgttacagctggctacaaatctatagcccgctttcttttctctcttctcttttcttcttgatatgtggttatagctaatttatagtatgagcaggtacaatagcagactataagccagctataaacatattttaaagagataaaagaggagagaggagcagtgggctacagatctgtagccagctgcagcacggactccaagacgcaatgtgtgtatgacaggtagaaccatgtattaataatatagtaagcaactattgtatgaattgactattaaattggctatacatgatttagagatagtagttggctatactattaaacttgctcttagcggccctcttatcctggccgccagcaaatatccattttcgatggtggtccttagcccctcactcctcgttacattttcactggcggttatcgtgtatggccgtcagagaaaaaataggttgacgccatgaaaaattgattttgtagtagtggataagccttaagcccctaacgtaccccatcaaatgtgatcagagtcatttttgacggattgatttttcggaccatcacatataagtcattcataacgggctgtagtttaatcaagcagaggggtgcacctcatgtcctcatcgatgatgggatttcattaagacccatttaaggtaattgtcataggtgacggcttctcgcccaacatatgatttcatatcactaaaccacttatgtcaccaggccggatccggttcacctgcatgccctagtgtgactgcaagttaagcagtagatcatccaagatattattcatccaaaaaaagtctacattttttactgtagctcggatactgtagcgttaaatctgaacccttcataggaaaactagatggccaaaatctgaaccctatcttgtagttcctagtgtaactgtggccgagttccaaactatttcttcgaacttccaacttttccatcacatcaaaacatttctatacacaaatttccaacttttctgtcacatcgtttcaatttcagccaaacttataaatttggcatttgatcaaaatcccaccaggctttcctccaacacggatgagggttttcgcctgacagaaatgacctgcgccccactaggcgtgtttgtttcgtgcatgtttttgcaccaagaggataaaatatgcacttcttctgtgaggactttacatctgtcctggatttgtgttgatagatgggaaagtgatttcatctctcgaggagatatcctttcgttttgtgcatgccacctaaatagtcactaaaaatttgaaaaaaaattggtaagatagattaatatgaaacatatcactccacaagcatgcatgttaaaatttaacttctacaagttgtaacaaaaataacaaatatagatgcaaatatacgttaactattttcagtttaatttgtttttttaacttgtagaaatcgaatttggtcttgcatgttcgtggagtgatatatttcatattaatctattttgttaatttttttaaaaaaattttgataactactcctatttaaatggtatgcaaacaacgagaggatattcccgcgggataaaaatccatatccttgatagataaagaatcttcagactcgctatatataccactatcccctccctcgttttgtttatcatagacgattttatcgatgaacctgaaatagacatggcttgccacttgagattatttccctttactcaactactagtattggttctgtacaaaatcgccgccgtaggggcagatcctgcaaacgcagaactatccacaaagatcacccaacactctccattgtacaacccacagcctcaagactttccaaacgaggagctctaccgcaactatctagtcatccagcggttcaagaagacaatcacttccgaccccaagaacatcaccgccacctggaccggccatgacatctgcggcaacacgacctacctcggtttctactgtgcagcattgcctgggcgtactaagaagcccacggtcactgtggtgatctttaacggttatggcctgcgtgcaccgaagctggaaggatttattgaccatctccccgatcttgcacttttccatgctgcctccaacgacttcggtggtgacatcccctacctcacaggcctcgcctacaactacaagatcaatgtcgacagcaatctccaaatacaggatgattttagtcgtgacatggtcgggtcgcatgtaacaactaaagttcatggttattgcgttaatttagatctagatatcacatttcacctccggcccggaaaagacgacaagaaaggacgaagcatccccggtgccacagattctaaggcgctcctcctcaactacaatcacctgtccgggccattaccggtgaacatcggtttctccaagttaagctacctggccctcgccaacaacaggctcaccggcgcaatcccgccatcaatcttgcatttgcaagactccctcctcgaggtgctcctcctgaacaaccagctctccggctgcctcccccacgagctcggcatgctcaccaaggccgcagtgttcgacgccggcatgaaccagctcaccgggccgatcccctcctctttctcatgcctcaccagcgtcgagcagctcaacctgggcggcaaccgcctctacggagagatccccgacgcgctctgcaagctcgccgccgtcccagccggccgcctcgccaacctcacgctgtcgagcaactacttcacgtcggtcggaccggcgtgcttgtcgctgatcaaggacggcgtcctcaacgtcaggaacaactgcattccgggcttcgccaaccagcggcggccggcggagtgcgcgtcgttccacagccagccgaaggcgtgcccggcggcgagcgccacccacgtggcgtgccccgccggagctgccaacgctgcggcggcgccggcggacagggtggtcaaggactactccagctacgtgacgtacgccaccctgcacgagtgagcccggcgccacggcacgggcgcacgacgtgcgtgcatgcatgcagtaggggacagctagaagctagcgtctcggggtggtatttgctcttgtattcttgtgttcgtttgttgtgctcgtgagtcgtcattgtggtttgttttctctgcacgtgtggctagctatggctgtcacgtctagatctcacctcctgtactcttgtgtactgtactatgtgaaaatcattggtgattactaaagtttggtgtgtgccctgccctacatgtttgataaagtttacatcatgtaaagcgtatctttcaaaataacggccatatttagttgcacccaaaatacccccaaccttccaactttccattacatcacatccaaaactttcctatacacataaactcccaacttttttttccaaactataccaactttccccaaactttccccaaacttcaggaactaaacacagtcatggctatttcaacgctatttcatcatcaaacaacattttcgaaatggcgagccacgtcaaattgcggaccacccatctcctcgtcgcgctgctctgcttcgctgcagcaacggccgaaccatcagaagggacgagctcagcatcgtccagccccgcatagccgcaggacttctccagcgaccacgcgtaccacgtgatccagcgcttcaagcggtagtgcggcaccatcgatcacgtacgacccgaagaacgtgacagccacctgatcctgaatcggccatgacatacgcggtgtgcgtcgtcgctggcgataaggacaagaatggtgccagagacgggtagaggcgccggctcggtcgttctccagctacgtgacatgatatgccactccgcacgactgagatgccgcagctagcgatgggactttgcgtcacgccaccacggtggtgcgcttggctatttcgcccgtgttcgttcgtagggctcgtcgcggtgtaccactcgtgctgtcgtacgtgcatgctgggttgttggtgctcgatcggtgtccgttgtacgtggcagtgcgtatcgtgcatgtcagcatgtgcgttttctgttcgttgccgtgttcgcggggggattccgcctgcgaatctcatttggatgtacgctatgcggtagtacggtacgcccttgagtgaccaccaatgaagttgggatgcaccatgtgcccgtgaggtgttgatcgcttttcagttttttcaccatggcgtgccgtttagctagaaatgcaagtgtcggtgccaacgacctgtgcataagacaggctgcatcgagaatggtttttccacttgatgtgtacttcaatcctggatggtagagctttcactatgtgaaaacaggttgaatacaaatttcacaaaactatacatattttaaataagctattgtaaaactatgaataatacatcataaaactatagtttcgtacaaaactatcacggaactccaaatttatggcatagtatcccaaaactacagaagcaccgattttatcctgaaactgcatgttttgtaactctggtagagcattattaatgcttagaatttattctcttaatacaacttagttttgtaataacttcctcaggtagttttgagatacttcgagccaggttgtgttgaactgtccccagaggacatccaaatattcgatttgcaaaatgagtcccatttgctagggccaatgggatgatagagctggcccaaacgttgccaggttgtgttgaactgtccacccatttttttttaacgaatcggcgagccaccaatttcattggagggagactagtgcacggcattccgtccgaacgggataattaaatgacacctccacctccccgagcaagatatggataaggttcaaagatggactcagctagcctaacgtatcaatatgcatggctctcaaaaaaatctgcacgtaggaattaatggttggcccccacgtgcatctagcgcttctccttgagtttgtaggtcagaacatgcatgtgtataggtcagaacatgcatgtgtagtgcattatcaactattttattaccacgctgttctactagtactaactaggatgagacgatttctaatagatatcatatgatacttgcgagatatcaccggtgatacttatcaggaatcagacgattccaatcaggtttcgcgtgatttctaccaggtatcaggtaatacttacgaggtatcacctgataccggttaggtatcaggacatgatacttgaaagatatcaggacctgatatatgtttctatccaaacggtgatacttatcaggtatcagacgattccaatcaggtatcacgcgatttctaccgggtatcatataatacttgcgaggtatcaggacatgatacatatttccgtccaaatggtgatacttatcaggtatcagaaactggtatcatgactacctgatacatacttctgtccaaacggtgatactcatcaggtatcggatgattccaatcaggtaccacgcgatttctaccaagtatcaagtaatacttgagaggtatcacctgataccagttagatatcaagtcatgatacctaaaagatatcaagaactgatacatatttctgtccaaacgggatatggtcctgtacaattcccggagtgagaaaagcacaatttccaaagagacgaacgataaaaaaaatactattaaagtgtcatgttttctcagtgtgaacatgcacccataaatatactgatttgactagctttatcatattgtattgtcaccaactcagatactggtgtgacgtgcctgctcgtgtcacgtgcccacgagcactcatgagggttgcaggcctgcaacacactttggttagctgctcgtgtccacgtgtcgctggaggcatgattgtgcacgaaatcagattgacttatgtccatatcaaggaagtcatgaatacttcattaaactattccgttcggacggtatcccgtacagtagtttttctcatttcattgaatatatagaagggataaaatacaacaaaagctgtacaaccaagaacaccatacaagctcgggacctttggtccgagcacactaaagagttagccagatgccgagactttttgcgcctgccaaaccctaagttttggcctcctcttttatttttgccagcaagccaattgccgagagctctttgtgttggaaagttctacagttttttttattccatatctcccaggtcactagtagtgttagggtgcgcaaagccttcggaactccttttatgtatgtcgtgttctcccaccattcaagcactgtcggaacatgtcgcattcgagaggggtttagctggtcacataccgccactgatttcagtccggttcttatgcctgttttccgtccactcaaaaaaaaattagagaagggcaacctaatctaaaattcgctcacatagatatttgaactcaagattttggtgtgctattcaggtcactgcaatcactaggctacatgccctttcgcaaacctaccaaaaatatttaaaatgcattaatatgaatagaagaaataaatgacagatctaatagtattgcttagttacggaatactgattccaattgccacacagcttagaacatcttagaaaagaataggagtgcatcatgaaacatatcgtgtgaacataagtttttgatgtacacagatatcatctaaaataatctaaaaaagattgttcaagtattttcagtagtattacacctatgtgaaagcctcgtctccaaattcatcatgcaaagtgagaaaaatctatcatatttatactgttaaaactagattttttttaacagctaaagtataataaatttagttgagatttcatatatgtgcactaactattggaattacttacacaaaattttcttcttttttatacatttgttagttattgtatatatgtgtgcaccgaaaacttatgtgtacatgatacatcccattgtacaagtataaggctaaaatatgttaatacatggccataattgttacactactgtcgaacaccaaaatatactaaagttggaaatcccaacaagctatttcacatcttttcccaaagttatgcatttctatatgcgagcacccacattgaaaaaaataaaaataaacacgatacaactatcgagaattatgcattttagaatacaggagtgagtgggcgcgcgcggcgcgcgtttataggagcatatacttttttaagtattcgtataaaggaaaacgaaaaaagaatgacagaacctcttgtgtgattacctgctaaggtgtataggctgggcctgtaacatatataaaccattttttagaagcgtctcctgtacttcgtagtatagttcaaccagtattgacgtatccacgctccatgactgtgacgccgcagctacgtatacgatgggaccgtgcgccccgggctctttggcttcacattgcccgtgttcgtgggctcgtcgcggagtacgagcaccgcccccatgcatgttggattgctggtgctcgtcgtcgtccgttgtgcatgtcgtgtcgctgcgttaattcgtgcatctcaccatgtgcgttagggaccgtatgccgtggttgcttgtgatgcggggggttctcgcctggaaaatctcatttggatgtatcgctcgctacgcagtacgcccttggcatgatcattgatcaataaaagctgagatgcaccatgtgcccgtggcccgtgagtgctgatcgcttttttgaagttgtttttcaccaatgtgtagctagaacataagtgtcggtgccaactaacagtgtgcatcagacagcctgcatctagatttatttcagggaacaatacgccttcatatactgtgggacaatgatttttcggcttgtgatgaacacgcaactatgcaagacatctcaagatcgatgcaagctttttggggcatgtcaaaatagattggtgcagtgccggtcttttccggccataacctgaaatcaggccaacgaatgatcatgcctattggacttgggaaggttcacattgcagtaggaataagttcactttgactcccttaactaggtgacagaatctgattatccatgaaccacgacaccagatatctcgacccccaacttttaaaaccggtgcaatttgactccctcggtggtttttgagggcggttttgctgatgtgacgcctacgtggtagtattgacttggtcttcgtttcattggccttgacgtggcgcttaagtggtataagaattaaaatatatatgtgggacccaattatcattcaccaaaagtatgtgtgggacccactgacatgtggggcccacatattatgctctctcttcttcctcctcctctctctctctcttcccttcggcgagccgcgagcgtgggacaggggccagcagcggcaggagggcaggcgggcgagggccggatcccctttgcgagcttgcgacttcgagacaacggcgggaaagcggagacatcgtgacgtggcggagacgagggcggcggagaggcggaatggcagcggcctgattccccagctgtcgccctctcaacctcttgtcaccactgccttctgctcctcaccgccgcctcccaaccttctgtcaccgccgccttccgctccctccccgcctttgatggcctcgccgccccgaccacaggagagagggggcaggccgctcctcaccgctaccttctggaggggatggattgtggcggcccgagctcgacggtggcaagggaacgacatcgccgtggtggcttgaagtcgcgagctcgcaaaggagatctggccctccccttgctgccgctggcccccgtcccacgctcgcagctcgccaaagggaagatagagcgagagagggggaggaagaaggaagaagagagagcatgatgtgtggacccacatgttagtgggtcccatacattcttttggcaaatgacaaatgggtcccacacatattttttaattctaatgccatctaagcgtcacgtggaacgaagaccaaatcaatactgccacataggcgttacgtcagcgaaaccgccatccaaaaacgccgagggagttaaattgcaccgattttaataagttgggggtcgagatattcggtattgtggtttagggatgcaaatcagattcggtcactagttaagggacccaagtgaacttactcccattggagtacgcctgtatgttagtagtgccaatggacaggagaaccggcccaaatagcggcaggttgtgttcaactgtccagcggtttcagtccggtccgtttgcgcctactcgtgatttgggccgctgatccgtcgtccacgacgaccgagatgagagcgatcccctcgagaatttcaggcgaacgcgcgcgttgagcgagcacttggatctcagagggcctctgctccctcgtgttgcgatgctctgcttcgttgaaacaagccagtcaggccgagagccgataggtcgcgtagaaccatcccgaatgaattgaaaagaaaagaaaagaaaaaaaaatctaactgtgacatcaaatacagagtacaaagatatacagctggtactcgtatcaattatttatatattaaatctaaaaactgtgtatacaatacagaattatatacgagagcatatataagagaatagagaatatatatgacagcataccactttacatgaactttggccttgatctttatagacatggttcacacatgatagaccatgtcgacttcatagccatctgaatgccgtccagattacgggccaatatttttgaactctttccatatttttgaggtgtaaaagacaagctttcacatagaaaatcgtcaaaatcatattctgtaccgaatctacagttcctgataacaccatcgggatggcaacccgaatggttgtagtatttataaactgttatggggaaatgtttatcatgtctcgcgctcaatgtgagtggaggtagcttgccaacacccagcttgccattgaagataataaaagaagtattaatgttaaagtaggttgcaactattaattgcgagtgaatcatgctcgtggttatcttcaatttgacacacctcaaactccaaatcaaccaggaccgctttcgggatagcaaaaattgtcagatcaatggtgccgaaatgaccagtgttgatgtgccatatgagcttttcaaaatctgcatagaaagatggagcgtagatagaatatccatctattaacacttgatcttcttcctccttttgacccttaataattaggcgatactcaattagcacaatcccaactgcataaatgcctcgaggaggggtcatcagaggttggaggcaatgagcaccctgcattgtaattaagatatttttggaaaagattagaactgcaatatgtatatattaattgttcaggaagtagcagagaaaactgtatggcatcatcaggtactcaccggcttaagtttacatgggttttctcttgagtagtcaaagacatagttgcgcagctgactattgcgtgtatctctgaatgcaaatgtacatagatctccaatggaacattactaggagaagatagattcagaccaagtacttgtatagctcgacggcatggttccttcccgtccctatctaaccatcgcctttcccacttggggagtgcaggcactagaagtagaaaatcaaaaaaagtcaaatcagtacatcttgaattattgtttgtgatctaaatgtgattagataaaactagaatattagggaaggacctaatatcaaataattagaaggggtgaggctttaaacccaagtcgtctagcccaccaccttgtggagctagccggaagacccctgggcatttctcaaatgtgattagataaaggagtctgtactgataaaaactatttctacaacagatggcatttggattgttagtacacgaattggactagtggacttactcaaatgatccgtaagtgttaggtttggatctaagttgaatggcccttcaaccacaagagacccctcccaagattctgaaagatcagggatgggaaacttcatttgtctgagaatttgcttctcccatgtctcctccctatcagctgcataataagggttcccgtcttcatacctaaacccatcgccgtatttcatgaaaatgttccttccattgctgtagaaggacactccactcccatcggagtcataatcagtttcgtacgtgtgcggcccatatattttctccaattcatgatcttcaagatgacagggttctccgtgtcgctcctcgatcatcctgcacacgtataggtcgtcttctctctcttgctcgtgtcgaaggcgacttagttcgtcttgctcctcgatctccctctgcaataagtcgatctctttgtcccatatccaggtgttgagtatctcgcgctctgcttcctctcttgtcgccgccaaatcctgatctaactccacgccgtcctccatagaacaacctcacagagtattgagcctccgttgacgacgtggatggacttgagatgaaattccgatcaactgaatccatgccactaacgcgaaccctcgttctatattcatgttctgcgtgtgtatacgagatccaatgggtattccgtatccgatatcaccaacctacagacgtgtaggatgctgttttatttccaaacggaaaacgtacatagaagttccctcaacttatcatcggattatagaatcatcctccaaccctaaaactaatactccctccgtttcgttttatttgacaccgttgactttttagcacatgtttgactgctcgtcttattcaaaaacttttgtgaaatatgtaaaactatatgtatgcataaaagtatatttaacaatgaatcaaataataggaaaaaaattaataattatttaaattttttgaataagacgagcggtcaaacatgtgctaaaaagtcaacggtgtcaaataaaacgaaacggagggagtatatgtcatccctcaatctattattatattattaaagcagttttgaaaggaggcaccactttcgctgtgggggctaaaaatttccacattaaccggagaaatagagaaaaatctacaccgttagatcataatagcttcagattttaatggtcaagattgatcggatatatacgtataagagaaggaaaaatactatacactaatcttgcttggactgataaagaaataaatcttgcatagacttctgttcggactctaattgttctctgaaccggattgcatggcctgatcattgtcgggcaatagaaaaaagggttttgctaaactactgtcgccacattttttgcttcgttacagtcgatttctggatcactcgatccccacaaagattcgtgccgtgataatttacatgatatgaatcaagcacgacaccggatcgggttagctaaaattatgtcgacacatgctataatcgacttttttaagccatttacacagaaattacacctcacttacaccacatttacatcctacttacatatatagttagtatgtaatttttgaatttacatatgtaattttaggaattacatatgtaattttgagacttacattataaatacattaaaattacatatgtaatttaaggagttacaatgtaaatacataccgactattttttggtgaaaaatatggcgccataaatatagctacaccctagaaaaaaacatgtccaactgacacgaaggccatatgcaagaaaaaagactaggaaacaaccacactgaatgcccctgatttttggtagccatgtacatacatacatatacgagaaaagataataagcaaaaatacctcattaaatattgattatatttttgttagcattagatcaaatcttaaatctacggtccacctgtttactgtattatataaatttttttttaaaaaaaaagtcttgaaaggagacaccatattcgttgtggaagctataaattctcaaattaattagagaaaaaaaagttcaggtagaaatacatttaaaaaataactaaaattcataataaaagaagtaatactgaaaaaggagtccatataaaacataattaaagattaactaaaatttagaataaaaataaaataaattctgaaatttgaaaaataaaaataagagtttaaatagaaatacaatttaaaaataactaaaaattcaaaataaaaataaggaataatgaaagaatagtacctgcataacataatacgagattaattataattaagaattgaaataagtaaattttgaaattacaaaaaaaaagcttaagtaggaatacaatttacaaataactaaaattcagaataaaaaataagaattgttgaaagaagagagcatctagaagacaacatgagattaattaaaataaatagaataaatttcgaaaatagaaaaataattataagagttcaagtcggaatattttataaatagaaaaatattggaagaaaaatatggaattttcaaacacaaaaattcatctagaacacagatgacaaatgacaaataacaataaagataggagaaacaataggtctgtaaaagagtagagtggtgacagttgatgggatatataaaaactataaataaaaccccaaatagaatcccaatgacgattaaaaggagtgacgacaggcatgccgttaaacaacatgatcacaatggttggcaggacttctaaaagtaaaaaaaataaaataaaccccaacaatcatcatgtttgattttaaaatcccaatgacagtaaagagagaaatagcgggcgatccacggaggagtacaatggcaaagccgctgatcgtttggcgagacatctagaaagtaaaaaaaatgaacctaaacaataattttgttcattttaagaccccaataacaataaagaaggggcagcggacgggtcatagaggcagcgtttgaccgtacttctaaaaattataaaaatgaaaaccaacaaaacaataaactctaaaaagtacatggtccgattttaaaggtttgagacttctaaaagtaaaaaatatataccacaatgataatcatgtttgattttaaaatcctagtgacaataaagagatgaggcaacgggcgagccatatatagtggcgaacccgctgacggtttggcgggacttctagaaaataaaaaaaataaacccaaacgataattatgttcaatttttaatatcccaataacaataaagagagtagacagcggatgtgccgtagaagagtatagtggcaatgtttgacgggacttctaaaaattgtaaaaaggaagtccaatgagacaataaactctaaaaaccataagctccagattttaaaggttacaaggagaatgaataaaaacagtggtagatcgagaaagcaaagaaagaaggggtgatagaagtaaggggtagcgactagcgtgacttttacaaaactataaaattagatatacaaggatgataaagtttagtctttcaaagtctgaagataactagctatttaataaattttaagcaaaatcatattaaaaatagataattttgtatgaatgctagccacgcaattgcgcgagcaacccagttagtttataaaacctagtcactttgggtccttacacggttttgaccgcggttttatctgacgtgtcggctgagttagcatgagaccccacgtggaccccacatgccaagatgatacgtcatcatctctctttccctcctctcactctctcccctctctctctctcactattctcctctctgggcagactagccggtgggtggggaggaggccgacgggagaggagaaggtccggcggccggcgacgccgtggtggtagcgatgacgcgggagacgagatcacctcaacctcatcgtgggtacgtacggcgtcgtgccggtcatcgtgccacgggttgccggcgtcgacacattggacgctactcgactcattcgagcccatccatggcgtgcttctatgagagtagtgtgtgtatcctcacctgataacgagccagtcgacgacgatgaacgatagtggtgttgtttgtggccgcgagatatcgtccacttgaggcgctgtggagcatgaggatggggaagccgttaaagtggagtaatccctccatactcgtaaagaaagtcgtttaagataatgtttaagtcaaaccttagaaatataaattatgaataactttcgagttgttaagtttgaaaatgtaaaaattatatgaatatatttgtcttgaaaaatactttcataaaagtatacatatatcacttttcaataaatatttttatataaacaagaagtcaaagttgtgttttggagaccgtgtcgctgtccaaaataacttcctttacgagtactacgagtacagagggaatatgtgcaccgccagtagcggatctaggatataggatatgagtggtccgacctcaatttgtttttctaaacaaagtaaatctaacgatactaatatatacaatgcatataatagactaaatcaccaaaagtttacaatgatatattaataaagcatcttagaacatactccctccgtttctaaatatttaacaccgttgactttttagcacatatttgaccgttcgtcttattcaaaaacattttgtgaaatatgtaaaattatatgtatatataaaagtatatttaacaatgaatcaaatgataggaaaagaattaataattacttaatttcttttaataagatgaatgctcaaacatgtttaaaaaaagtcaacggcgtcaaatatttagacggagggagtataaaattagtaattaagtaatattttcatttaaagaagcttacacgactatgaaagtttaaagaagattaccatactattttttacttatcgggtctatgcgggcggacgggcgggcggtgcactgcagccaggaggttaggaggcagttctctgtgagtccgtggcttcgttttccagttttcctcggctcgacgacagctccttgtggcggcagcacacactgcagcagtgtggcactgcggcggccaaggcagcgagcggattggggtggtcgagcggcggcgcgacgctagtctgatctgatcgcgtgattccaatcgcgtcggcagctcggcacgtcgctagggcgtcagggcgaggaggagagaggcacgtctgggcccggcacaagtcgcgcgaccgcgacgctacagtttctttccttcccttcgatccacgcgcgtggggggctcctaagagcatatacaagagtgtctcgaaatcttaactctccaaatatctatttagctaactctccgttcaattagcaagttaaatttttttatttacttcagcctctccattcatcctctctattctgattgcatgatagtgggacccgcatgtcagcctcaaccttttcttcttcctcattttctcccctttttcccgagcagctacacaagcagagagcacggcggtgaggcggtcccccgtggcggcgccgcgggtggcgaacggcggcggaggagggccgcgcggccgccgcccatggtgccaaggctctcatgcccccgccgccgccacaatgctccgcttctgcctccgccctacgcccctacgccctcgtccgcctccacccctacgcccctcctcccctacgcccttgtccgcctccgccttttgtttcatttggaagcagctggtactgtcggcacaaaccaaccaactaggcgttgcgagtgatcaaagatactgtcttttgttatcctctgaaactgaaaggaatgcgatatgatttgatctgacgagatgtgttttcacctgtcacttggacaagatcgtagggctagatgtccgattattcaccagctgtgcaaaccaaaccatcacacaccgcattcaaagttcacaccgatcacaagttcacaaccatcagtcgtcggctacaaccttgaacaagaaaaatgctcgatcgaagctcgtttgactgacgtaagtagatgacaccaacctgaagaaaaaagacgtgtagagctaaaagctaagggcagggaaaagaaaatcgatggctgctgttcgtcgcagtcgacgagcttagccatcctccaagcgccgccgcccgaaggtgctccccgtcctacctcgccaccccctccgtctccccctccgcctccacctcggccctcgccgccgccgccaccaccacctcctccaagcgccgcagtgctccccgtccttccccgtcctaggtcgacgaggacgtcgaggccgcgctctcggtcgacggtggtgaccgtgccacggcggatggggctgggaccgtgcgctaggaggtgacgcggcgcacttttttttttgacgctaagagcacttaacgctaactaagagcgtctttcttctttttcttaagttgactaaaacaaactttcaattccagatttgaactcagatttaaaaatttcaagtcaagatttaaaaaattttcaactctgatttttaaatttgagttaaaagttttcaaacctgagttaagttttcaaatcttgacttgatgtttgtaaaatttgaattgaaagcttcaaatcttcatttgaaagttttcaaatccgagttgaaagttttcaagtccgaattgaaatttttcaaatccgagttgaacgttttcaagtttgaattgaaagttttcaaatccgagttgaaagtttttaaatctaagttcaaagttttcaagtttggatagaaaattttcaaatccgagttgaaagtttttaaatcttgacttgaaagtttttaaatctgagttaaaattttttaaaaaatcttgagttgaaagtttcaaatcttgagtcctgctcctacacgcgtgcggtagtcaacagcgaaaagaaaaaaaaaggaaacaatggcagctacgaaaaaaaagaaatgacgtcacgaaaaaaagaaagaatcgcgctcgcgcgcgtgggccttgtgggccagaagtgcgtgccagcaatgcgcgcgaattagcatttgtggcgtgcgggcgccaggatcgagctttattctgttcttatttttttaatagtagggtcgatcactgcacggacgaccctatggatccgccattgtgcaccgcccacgcctcatgcacggacgcacggcccaaccgcagggagacgctgctcccatcgtcatctgcatagaggtacgtgccgtgggcgcggctccacagccacacatgatgcccattgtggaactgctttattgcctccggcaagcagcggaagtggcgcggggctcttggtttcttggtgcttcggtcagcgagcgggcggaggagcttggtgctcttggtttcttggcgattgggtcggcgaagcgacagagatggcgcgcgcgggggaggggggagggggggtcttgttttattggcgctctgatcggcgagcggaagagacagtgacgagctctttgtttcttggtgctccgacgaggagagagcgcaaagaggagagaagttcgttgcgacggttactgcacagggctctaggcaccaagaggggagaggaccctagccagcgatggcggggttgcgccgccgccatagggattcgatggtgccggtggaggtcagatggcgctggggatgacgagttggtaggcggcggcgaggtggccataggaggagggctactcttccgcactaccataggctggccagtgaggaggaggggagggtcctcaggcaaccgcattgccgggcaccgaccaccatgcgcctctccccaccacacgccaccccctgctcgtcttcagccgcgcggagagaagtaggatgggagatgaggggagagaagatcgaggtgctaacatgtggggcccacatgggtcccacgctgactcaaccgccacgtcagatataaccgaggtcaataccgtcttaaggacccagagtgacccgattttgtaagataagagatgtcatatatttgtttttcggttgagtgacgattttataattcggtgacaagttgaggaacctttcatgtatttttttcctttccaaactcgtaatccagttgattttaggtgggctagaattggatgtcctggagtcggtataggcccagagtaaagcccatcgtgctcccaaatcctcccaagcgtcaagtccgcgaacagctgcataaatggagagcagcaaatgttaccatgatgttgacgctctgctcccgtctttgtgatattgatgctagaggctcagccttcaggcaatggtggtgatggtgagttagctagctagaggttcattcaaaccgtcgatctccacaacaataccacactcctacttcctccgttttatattataaagtgttttgagttttaaatagatgttatatgagtcaaaattcatatgaatgaatattagtaaatctaagcaagagatgttgaggtcaaaacgtctaatagtatggaaaggagagagtacaaccctaggagacaggtcaccacagtccacaagcatttaacagtagaacatcacgcctaggacacgatcagcaatctttggaaccttcagaaactcaggcaactcagaagacacttcattcctgatgcttgatccatcgccaaacttcccgagatagcttcgtcctcgggctgcagcaagatgagcatagtatagtgggggaactgcatagcaaagttaaaaagtttatgacttcaagcctaatcagtagccctcaatagtccaaataaaaagacacacaacgttaatttcagaaaagttcacaaacaagtttgtccagaaaaagtacagtacacgaaacctgagaggatagatcaaaaaggctacgatgtttagaaggggcacaattatgaccctcattcgtgtctcaataaagtaagctatcaaatggtaccctatctatactttgttaaccaccctagataaaagatattatcatcaaacataaaccgaaagttgactcacctatagaaacagcacgggtgcatcgtgcatacctacatattgaaaagattagagttaaatggcaaaaacaatcaaggtgagcacaaaaaagtaaataaaataaccaaaggtggacgtgaacttacatgtaacataggttgtgtgtaagcaactgaagcccgtcagcagtgaaatgattttcatcgaagataactgtataatgcgtaggtctactgtttccctgaaaatgacattatatacaatagattataaacaaatattcattaatacttataccatcatggaagtaccgaatcatacaaagcaaatttcacacaattgtaaatatgaaaactataatttagcttcaatttcaattggacattttgcggaactacaataataatacacgatttatcaaagactacaaccctacttgtgttcaatatgtgggcccaatgtgattattgcatgtgggaataagttcatctgaggtcccttaacttgtcaacggatctgattttcgtccctcaaccggaaaaccagacacaacggatccctcaactatcaaaaccggtgcagatgagatccctcggcggttttgagagcgattttggctggcgtggcgcctatgtggcgaatttgactcggtcttcatctgacgtggcactgacgtggcgcttacgtggcaatttgatctcgaaaaataataaaacccataggaccgacatgtcagttccacacacaaaataataaaaaaaaatggtaggacccacgtggaccccacatgtcatcctctctccttcctcttctctcaatcccctttctctctctagccgatggagcagggcgagcggcggtcgacagaagcgggagacgggcagagcggagaggctggccggcgaagcggggcgagcaacggccgacggcgggctaggtcaggtccgcggcacatggggccatagagcgcagacggcggcgactgctggcgttgtggagaagggcgtcaacggcatcgtcgggagtatctcctccggtcacgcctcatttcccttctcccctctccctccctaaaggcgagcagcgagcaacgggatagaagctgggcggttgcgggtcacagccgggagaggacagcgggtggggcagggagggaggaggcgagagggcggcgagcggagcagggagggaggaggtggagcgaccacgggggaggcctgcttcattgcggcagcgatgctgtcgaaggtgtctccaggcgacggtcgcgatggtgggcggaacccggagatggaggcagcagtcgcgggggagtctggccttcccgcccctctcgctggcctccttcctcccccgcccactcacctcctccctcttcgcgcgcttggctggctttggttcgccgacggagagggagaagagcaacggccagccattctcccacagcgcctccttcgtggggagggcagcgaaggcggcctccatctcccatatcgtcattcggattgccagcaacggcggcggctagtcccgcccccgcggtgaggtccatcgcgacgccaaatgcagccccgccccgctccgccccgcccgtcgctcgcttctgccggccgccgctcgcgccgctccatcggccggagagagagagaatagagagaggagggaggagtgaggatgacatatggggcccacgtgggtcccacgggttatattatttttggatcaaattgccacgtaagcgccacgtcagatgaagaccaagtcaaattagccatataggcgccacgtcggccaaaaccgccctcaaaaccgccaagggacctcatgtgcaccggttttgatagttgagggacccgttgtccggttttccagttgagggacgaaaatcagattcgttgacaagttaaaggacttattccttgcatgtgtgcatgacatggctgcccaaacttgtgacattttggcccaattaggatatggcttgtgtagcccatgagagctgtgtgcgcatgtttagtaccaccttgctagtctagcaagggtggaaccaacttataaagcatcatccctccaaccatatcactcccgggttaacccttttacatgaagcgaggacgaaagtgtaagtggattagtaaatgtaagtagacccgcccgtcggacaggctggctacacggacgtacggacagttgggtcctttgaattaggatatggcatgtgtggcccatgaaagcggtgtgcgcatgtttagtaccaccttgctagtctagcaagggtggaactaacttataagacctcatccctccaaccatatcactcccgggttaacccttttacatgaagccgaagcgagaacgaaagtaccaccttgctagtctagcaagggtggaactaacttataagacctcatccctccaaccatatcactcccgggttaacccttttacatgaagccgaagcaaccttttacatgaagccgaagcgagaacgaaagtataggtgcagtggtatgtgtaagtgggctcagttgtatgtgtaacccttttacacgaagcaagaatgaaagtgtaagtgcagtggtatgtgtaagtgggcctagtggtatgtataagtggacccgcccttacatgaagccgaagcgagaacaaaagtgtaagtgcgaagcaagaacgaaagtgtaagtgtagtggtatgtgtaagtgggcctagttgtatgtgtaagtggacccgcccttacacgaagccgaagcgagaacgaaagtgtaagtgcagtagtatgtgtaagtgggctcagtggtatgtgtaacccttttacacgaagaaagaacgaaagtgtaagtgcagtggtatgtgtaagtggacccacccgacggatggtggtatgtgtaagtgggcccagtggtatatgtaagtggacctgcctgatggatgggcttgctacgcggttctagagggagggctgtcggatgggctgatttttatctaacaaacagaactaaagatttttgaaatgaatagcttaaattgcagacaaaataggtatgtttttctgacatttatatacctgagaagtatggctacacaaataaaaatcaaaacccgaaggatggcatatgtcttggtcaatcacagttcctgaaaatattcaagtattacattgtgttctcaataaacaaaaataaagaacgaatatacaatatttatagtaaggtccttctgcaaaaacataagataaaaatcctatcttgctcaggtgcatgcgttctatttggctacaggggtttcccttgcatacatccagaactaaaagttagcaaaataaacctaataaaactacagaactactaacttgctctttctgagttagagagcttccactgtgcctgaggttaggttttgtcttggcagcttatagggctaaattaggctgttgccaccatgaagattccatccagcacgtgttggtcaagtttttattatttttattttgtggattttatgttgttatgtataactgcatgtgtgagttgtacagatataaccatgtcatacaaataaagtttttgttgtattaaaatcactgagataaagttttaatttagaaccactgagtttctgaaattgtttattgttgggtttgaaaatatttaaagtcacccatttcaaaatcttgaaataggacaatctggagtaataaactacttaccagagggaatctgtgcaacttgttcagtataattactgcaaagtgtgtgagggaaaatcctggtgtgatgccttttctggacaatcactaatgtgattggtggcagataatcctcttgtagagagaggcatgccttgaaaaggaaatagataaaatcagaaataaatttagcggacaaccagaattacacaaataaatgtgaagcatcaccttcctgatggcatctacttcatgaatgataacctggctgaattgactttcgcttattccatctctagaagcaacaatgaccagtcaaaagacatcatccaagagaatgaataaatatatcactattttgcaatgcacacctgtaaaagattatcctttcaggcttacgcctattcctctggtagaagttcatcatcagttccctacagcaatcaaaacacatgtcagattccaaatcaatcacgtgagaattaataatagaaaagtcaaaaaacgcagatagagaagatacttacctgatcatgccatcaggtttaaggcacccttttggatctcgagtagaatgaaatagacctcctataatctcctgcctttcaagttgggcagagattagctctatatgtggtgacttctggccagtcgattgatccaaccacctaaaagtatttgacaaagtaatgtattgacccacaacaaaattggagggactaatcctttcaaaaaaaaattggagggactaaggagtaaagaggttgagttcaatttcaagttctttatataatgagccaaaatgtttatttccctataagaagccatagtagtaaaacagaaacaaattctaagcaacagggaaaatcttactcctgcaatagatgacgagtacatccctggtgggggatggctaacatcagcaccaaaaatgattgtcggtatgtctgacacgaacggtattccattatgaacaaacgcttgctgaagaactgtattctgccctccaacctagttcaagatactgttgtaaataccagcagtacaatacatggaaaaatgtgtagcaaagtatcgatacatatgtaccttgacatttatcttaagggcaatattctcgaggtattttatatttgtatctgttttaacattctttggtaagcagcactgagaaaccagtccaagcttggtctcacatacacgcttaatttttcctatagaaacatgcaaaatgacacctcaaagctaacagaaagcacagagttttttagcattaataatttcataccatagttgcctctttcttccggaagaatgacaattaatagctggagttgttcttttgcagtgctgtgaatagacttcaatgcagcagctatgttcagatcattaatagaccataatggtaccaatggccactctttgaaatccttgcaaccacaaaataaagtgattgttaatgcaatatgcaacaatttgaataacttggattataaatcaatgcaggaaatagcataccattccaaggaagttgcacgtcttgatcatttaccacagaatatcttaactgttgaagcaggtacttttgaaaaatttaaacaagcccatctctcgacttttcctccatttaccaatttctgaaataacaatcaattcatactcaaaaaaatatagagcagaaaacatgcactctaacaattttgaattttaacttcaattaaagggaatatggcactttgttgcaatgaagcataggtgatatatacttatgaccctgcacactatatgatgtatggatatttatgcatttcgtgtttgttgtttgttgtggtgactgaaatgcctggttcatattcaatgtatgaaacaaatggcctccaatacttttcctccaactagctaaacagagatatgacaaatcacagatgtcctaatattaaccaaaacaaagaaatttgaagttttatcaaatgtgcctttcacttgtgtgctacttgagtatgtaattacactatatgtgagcacattacgtacatactgccatgttgaagaacaagggtaagtaataaaaaatgcaatgtacgaaataggatggcagattcacagcctaacaccataattagaaataaataatgatgcatataatcactttatgacttcacttgtctatggagtttgtagaggttaggttgagttcatgaggcttccatttcctttctcatgtcatgtgggggcgccactaccaccgcaggagcaggccggaggcacagttgcagcaagcagcatgagtcaagggtgcaaacttagaaagaatcatgcaaggaaagtattaattaggaggaaataaatgtcattccttgtattagatgccaagtgcctataaggcatgtaatcagcaacatttgaagataagcaatttgagatcaaaattcctaatctccctccttcttccctaacctccctctgttcaccattgagcgtgcagggaagaaccctgccgccgcccctgatcccggctacgaactccgtagccgcggtccggctatcctcggtgtcaatgcacttgacaacttggtatcagcttccaggcgttcctcttcccgcactgccacatcctcaccaccagccgacgcgccaccatcgccaacgccctccatttcttcagccatgtccgagcccaccgccaccgagctcgccgcgctcatcaaggcgctctcggccaacgtcgacaagctccaggcatctgtcaccacactccagcaggcgtcctcctccaccagcaagcactccggcgagcaccacaacgaccgaccgccgcgattccagaaaatggattttcccaaattcgacggcaagtccgaccctctcgccttcatcaactgttgtgaatcctactttcaccagcagcggatcgcggaggaggagaaggtttggatagcctcgtacaatctagaagacgccgcacagctatggtacacccaggtccagcaagacgagggcacaccgccatggcgtcgcttcaccgagctgctgcacctccgtttcggccctccactgcacaccaaccccctcggcgagctcatggcctgcaagcgcaccggctccgtcgtcgactaccaagacaagttggaggcactccttccgcgcgcgggcaagttgacggaggaacaacgcatccaaatcttcacggccggactgcaactgcccctcagcctcgacgtggagattcacaacccgcagacgctcgtcttcgccatgagcctcgcccgcaagctcgagctgcgcaaccagtgcgtcgctcccgccgcgcctccgcgccacaaccagcgtggcctcctgcccgcgcctccacagctgctggcactcccggcgccgccaccaccgactgcaccgtctccagcgacggtgaccgtcgagggccgcacggtcaagcgcctctcccaggcagagatggaagaacgacgtcgcctcgggctatgcttcaattgcaacgacaagttttcacgtgggcataaccgcgtctgtcagcgcctcttcctcctcgacttggccgcgcccgacgacgactacgatgacgacagcacaccagaggagacaggcgaaactgacccgcacgtctcgctccatgcgatcgccggcgtccgcttcagcgacaccatgcaagtgcacatcaacatgggcggcgccaacctcctcgccctgctcgactcgggttccacacacaagttcgtctctatggcagctgcaagtcgcaccaagctcaagctcctccctcgcggccagatgcaggtcacggtcgccaatggagaacgcgtgccgtgcccgggcctctaccgcaacacggccttctccatcgacggggagacgttccacgccgacttctttgcactgccattggcagggtagaacgtcgttctcagcacacagtggctggcgtccttgtgttgacgcgaaaaacacacactggcctgagagatctgcttagctcaagtgcaggtccaaaacttgatgagatgcgggcgtgccagtcagtttgatcttgcaactgataagatacgtaaacagtagatcaaatagccgatcggctgaaaagccgatggagcaattccagccgatgccgataccagccgatagtgatagggttttgagcaatcggctatatgtccaatgtagataataatataaaagcaatcgactgatgataataaaatataccaacaatataatccagtataaaccaatcggctagcaatacaatatgatagaataagcattgatctgaaggttaaagcatacatcggctggaggtccgatgtcataaaatccaaaagattagattaaacagtgaaacctttgttgcgatcggctaaacccaacttgtgtgtaatccttataagccgatgcaacgtccatataacttatcggctagaaccccgataaaacattagcatgaacctatcggcttagcaagacttatattatcaacaacaatctagtagatcgaacctaaccgatgcagcacgagattgtatatgataatataatactcgatgagccgatagatctgtctaatgtgatggatataacaaatctatttagaatagcattgtgattgtagagatatatcggctaagacagaagatcggacctaaccgagacagtcccaactaaaccgatgcgtctctaaacacaatggaattagagataaacttgagatatcaggaaggcaaatcaatcaaccaaatcagagcgatccaagagatcagagcgatgcagccttgaacgatgccgatgtagatgacagattcaccagggcccgatggaacgtaggacttaccccttcgccggagatcgaaagccgatgcagccccgcgtcaggtgcccaaattccgccggttgataagtaaaaacctcagggaagagggtggcgatgcgccgagagtagttatattgatcgagattgatagattgcatagaccccgggtgtacatatttatatccatgggttgatacaagtccttgtcggacaagaaagaaactatcctaaagataaaaggaaaacatgaagtccttatcggacactaaacacactttcctaaagataaaaggaaactaacaaactatttctaattaatagataaactgccatgccgcatcttccttaaactcgtagtcttctagataagcttccttcgattgatccgactccaccaagaacacgatagcatggcgacttgacaactcccatcagctgtttctagagctctgaaaccgatagtgactttcagccgatgatgactttgggcttaccaaatttcgtcgttaacaccttgggaccgatcttgtgggatttcggctccctctccatgtccttttggcggcatgaccatcgtgtgtgctggcacggcgtggcaggctccgctactccctcgctgaaagccgtcgcgggccaagacatcatggcagcactgcttgacgagttcactgccgtcttcgccgagcccaagggaatgcctacaccgcgctcaagggaccactacatcaaccttttccccggctcctcaccggtcgccgtccggccctaccgctaccccgcctcccacaaggacgagttggaacgtcaatgttccgacatgttgacacaagggctgatacgacggagtacatcggcgttctcgtcaccagttcttcttgtcaagaaagccgacggctcatggcggttttgtgtcgactaccgcgccctcaacaccattacgatcaaggacgcataccccatccccgtggtcgacgagctccttgacgagttacatggcgcccgcttcttcacgaagctcgacctccgctccggctaccaccaagtacggatgaacgccgccgacatcgccaaaaccgcgttccgcacacatgacggcctgtacgagttcatggtcatgcctttcgggctttgcaacgcccccgctaccttccaagccctcatgaacgacgttcttcgaccgttcctacgccacttcgtcctcgtcttcttcgacgacatcttcatctacagcgactcatgggcggctcatctcgggcatgtgcgcaccgtcctcgacaccctccatcagcaccgcctcttcgtcaagcgctccaagtgcgatttcggcgtcacctccataagctaccttggccacgtcatctccgacaccagcgtcgccatagatccggccaaggttcaagccgtctccgactggccgcagccacactcggcccgcgcggtgcgagggttcctcggcttggcaggctactactgcaagttcgtcaaggatttcagcacgatcgcggcgcctctcaccgctctgctgcgcaaggaggggttcttatggtccgatgaggcggcagctgccttcaacgtcctcaagtcagccattacctccgcaccggtccttgccctccccgacttcgccaaaccgttcgtcgtcgagtgcgacgcttccacccatgggttcggtgcagtactcctgcaagaccaccatcctgtggctttcttcagccatccagtggcaccacgacacagctccttggcggcatatgaaagggaattgatcggcctcgtcctcaccattcgccattggagaccatacctatggggctgccgttttcttgtccgaactgatcatttcagtcttaaattcttgcttgatcagcgtttggcaaccatcccccaacttcattgggtgggcaagctcctcggcttcgacttcacggtagagtacaaggccggtgctagcaacacggtggctgacgccctttcacggcgcgacaccgatgagaccatgctcctcgccatctccgggcctcggttcgacttcatcgactacttgcgccaagcccacgactccgatcccacactggtggcactcagggaggagctgcaggccaaccagcgtagggccccatgggccttgatcgacgacatggtgacgttcgacggccgcctctacatttcgccggcttcaccacttctccaggaaatactcactgcgatacatgctgatggccatgagggtatacagcgcactctccatcgactacgccgcgacttccactcaccaaaccatcgctcaatcgtccaggaccatgttcgtgcgtgaatcacttgccaacgctacaagtccgaacatctgcatctggcgggcctcctccttccgcttccggtaccaacagcggtttgggcggacatcggccttgatttcatcgaggcgctgccccgcgtcagcggcaagtcagtgatcctaacggtggtggatcgcttcagcaagtactgccacttcatcccactggtgcacccgtactcggcggaatcggtggcccaagcattcttcaccgagattgttcgtctccatggcgtgccgcagtccatggtctcggatagggacctggtgttcacctccctgttttggaaggagctcatgcgtctcatcggcgccaagttacacatgacgtcggccttccacccgcaattcgacgggcagaccgacgccaccaacaaggtcatcatcatgttcctccgctgcctcaccggcgaccgccctcgacaatggcttcgttggcttccatgggcggagtacatctacaacacgccgttccagtcggcgctcaaggacacaccgttcaaggtcgtctacggtcgagacccccccaccatccgctcatacgagcccggcgagactcgggtggtagccattgccaagagcatggcgcaacgcgacgagttcctcgcagacgtccgctatcgtcttgaacaagctcaggctgtgtacaagaggcactatgacaagactcatcgcgacgttagcttccaggtcaacgactaggtgtggcttcgccttcaccatcgcacccggcctccctcaacgtcacaaccaagggcaagctgaagcccaggttctacggcctgtaccgcatcctagcagtcatcaacgacatcgcctatcgcctcgagcttcctccgcgcgcgcgtcttcatgatgtgttccatgtcggcctcctcaagaagttcgttggcacgccaccatctgtaccgccaccactgcccaacacacaccatggggctgtggttcccgagccggagcgagctgtgcgctctcgcctcgcccgaggcgttcgacaagtccttgtccagtggaagggcgaaccggctgcctccgccacatgggaagacgtcgacggtttccttgaccgatatccttcttttcagctcgcggacgagctgctcgtcgagggggggagagatgtcatgtgggggcgccactaccaccgcaggagcaggccggaggcacagttgcagcaagcagcatgagtcaaggttgcaaacttagaaagaatcatgcaaggaaagtattaattaggaggaaataaatgtcattccttgtatcagaggccaagtgcctataaggcacgtaatcagcaacatttgaagataagcaatttgagatcaaaattcctaatctccctccttgttccctaacctccctctgttcaccattgagcgtgcagggaagaaccctgccgccgcccctgatcccggctacgaactctatagccgcggtccggctatcctcggtgtcaacgcacttgacatctcaataataatttcatgacttcagctttattttctaattagactttatgactagaaaagaagtatagggatgcacaatcaatatcaactatgtttaagaagtgccaattactcatttgcatgtcaaaattttggattccagggtcaaactaaagttgaggatttaactaagcaagttgatatcaccttattgatcatgttccatcgtccgccagtaggcacacacgttttctcattcccggagacatggtacttcagctgaagattgaacaattaaattttggaataagtgacaaattttttcttcaaagttcaaatgaaatgcatctaaatgcagcataaatacctcaggtgtaggcaagatgcggccacacacaatggcaggaagaccattaactctaattccaaactcctccacacacctctcaacgttacagttgttgcgaacctgccagaaatccaaaatttgagaatacaagtatcgggcatgagctaataaagagtaccaaagtccttataagcattggataactaaaatccaataacacctgagaataaaagtataccttcataattgcgatcttcctaatatggggccgttcacaagttgccttcaatagcttagctgcctgtctcgtagtaagcttccgacagtacctttgccctggtaaaatcttgcaaacctaaaaaaaaaaactgataatcaaaaccttaatatttatgtttataatcagattttggaaaggcacctccatgggtaagaaaatatcacgagagcttccacactgcaaacatggccaataaatgtacttcaatttgtatttgtaacgcttctgaaaataatcaaccacagttgtagtaaaattttctttagcgccctcagcaaacctaaaaataatataaggaaaaattttagtaagcataattaagggggaaatattttgttggatagatgcttagcgtatgagatcaaaacttacatgaggtcttccaagggaacgacagaaagccctttaatcttgtatcttatggttttgtctgttcgatgggtggtttcaacaaaaacaccctgcagtgctttctctacctggcatttacaagaacagcaatacaaaatttaatattgtctaaactgcattataatagcaacatgactaatgattaaaaattaataccttgtcatattcctctgtagaaaatagttggttgacatcagttctattcaaaagctcagccacaaattccaccactggaagaggtttataaaatggtgctgctggtatatctaaacagcaacattatacctaaattagtcttcaaagatagagacaaaaaaatagatagaaaaattaaaaggcagcatttgttactgtacatccagaaaatacggtgtttgatgatggacaccacaataacgaagctttgcttctggacactaccaaaacatggcctttacaacaggacactaccttcatttttcttaatcatttttgtcatttagggctggtttggtttgtggcctaaattggccttaccaatttatgtcaatgtcaaattttggtaacttttggcatggctaattttggcaaaggaaaaattgtgtttggattgaagccaaaatagcctaaattaactattgaaatggcctattttcttaggcatgccaaaatttggctccaaaccaaatagacaataaacactattgaaattgccaaatattggtaaggccaatataggcctcaaaccaaaccaacccttagagagatctttgttaaaggacaaaaatgcccctagcccactacccgtcctcttgccttggcctggttcaattggacccagatcgagtcttagatccatccctgggccatgtctttcccttactctagccctaccaggcagcgagcatgaccatcccttctcccacattaggcctccatccccagtgctcccctacccaatctcctcacggcagcagcaacaagcaaaggaaacaaaaatgaaccctagcctcagtctcctcacggcagcacaacaagcaaaggaaacaacaacgaaccctagccttactgaggataatctacattcaaacacctcaaggagcttagcatggtgaaacagagatgttgatggctaagagataaactcaaatgagcaaggcacaataatatcatgaggaaatcttccgaactgtgaatactaccaaaatatatatcggaatcactttcatccaaatcctatacctaccaaccaggaaaataaatataactttgcttgagattatcaagagagccaataggtaatttgctgcattggcatgaaggcttctaacgcaagaggagaaatagtcagaacaagtgcaattgcttgacatgtacgacgagagcaaatagattagagggatcctgtttgttgatgggattggtgatgttaaggtgtcccatgttgacaaagtagacagggatgagtttggatagtgttatggtccagccgaaacaaataatataagccaggggtatcaggtcatttgtcagttttatttcattgaaattgcagaaaataataaaacaatgtgcatttgtgcacgatgttaaatggcaaataaacataaagcaacagtgtccacgagcaaagttgcattctcacagtgtgtgccaataaagaccatatttttcagacatcctgaagcaaattttgccaaattaaaaaatagtgacaatttctctttgattcatcaaggacacaaatacatctttttgcaaattttgcaaaaaaatagtattgccaagtgaactttggatataatattaaaggagataacttaaaaagtgtatgaaagagcctacattaacccaaaaaaggcctacacatgtacctatatttagaccaggaccaaactgtgacaagcgcacacccttgtagcaccctctccaaaactccaatccctcctgggtgtctattatgggaccaaacttagtcgaaaagatcgtcccaggagcactgagacaactgtagctggaaaaggtcaacagcaatatggctaaacaatattgataatttaatgtagcgcttgatattataacaaatgttggtttataattcacaataacctctatatgttgataatttacctagaaagcagcactctaacaacagcgtcaatcgcctgtatagcaccttgggaggcattccttctagtatggtagctttgtagatcttgtaagtctatccttttataaaactgaattgtgacctcatgaactccttttgtcctgcaaatttaagacgcccaaaatttcagttaaaattcacagatgataagtgtgttcttatgaaaatacaacgttaacaaagattctaagctcaccttgttttgtcttcatcatcatcaagtttgatcacaaatgtttctgacacaatagggagtgcatgtgcagtatacaagctttttctagtatcaaaaacaggtatcttgtttctgaaaactctttctccatgcaatttaacaatctctgaaagcacagcttttttagtaactcctaattttggctcagggtggatggaaacctaataaagaagttcaaaaaatcgtgaaacaacaatcatcagaaaaattattcttatgaagtctaagttgagcaaagtacaaaatatatcaaaaatcataagaacaatttaaggaactagcggaaacgggcatgtcttatttattaagtgtaccaaagaaaatcagtatataaccgatattctatttcactaatcattttgtctccaatatgtataaaccaatgcaatcaggagcaaaacacttactttgggaaaatcagtacataactaacatttttttcactaatcattttttgtctccaatatgagatatcaatgcaagcaggagaaaattacttactttgtacagatagattgcagggcaattcacagataccccgaaatagtttgtaaagatggacaacttttttccggctgatccataccctgggcgcgctgcaagggaatccaccctctctttgtacgcagggacctccccacataccatctcatcatcatctactgcaacatgtgactgcatatcaatagggcaagaacagataagtggaatgaaagtttgtaatgaccaatttatttgatgcagtcctatttttacttgaagaaaaaggaaacgccatgtagctaaaaatgaatgaaagtgcactttattggagaggataggtgtttcttgtgtcaaatgctcttgagtctatatgctccgaaacataactcaacagcttcatcctaaactcaaagttcagcatgccgtagtatacaatacttataacacaaacaatagcatactatatcattttgagagcaagagataccaagggcatatcaacgtgggtgcagaggggctcaagtcccccctacacccgctggacccatggagccccctccccctcccccccctaccccagaaaaaaaaaacactgagaagtaggggctgctgaagctgtctgatggctgaaggttgaagaagacacgcgattgggccagactacccagtgaatgtagtaatgcaatgtcaattgtgccaggtggctaggtgcacacgtccagttgttcactaattgggctttcaacttaggctacgttcacatgtcctcgatgggaactcattccctccggtccattagtgattaattaagtattagcttttttttttccaaaaatggagtaatttgattttttaaagcaactttcgtatagaaactttttgtaaaaagcacaccgtttagcagtttgaaaagcgtgcacgcggaaaacgagagagaggagttgggaacaaggggtgccgaacacagccttagccatcagccgaactaacataaatccaaaatctcccatccagtcaggtcatccccaatcccgtacatggcatccggcatggcggcatccccaaccctagcgagcacagacaatgcgagctgacggcacagcggcacgcggcatgcaaggcaccggtgtgccatgggcctgtggtgagggctgttgtgcaaggcagggcaggccacgcagcggtactggcagcgcaataaccggcattccggctagccgacaactcggcaagctactgcctgcgacttgcctaacttgctgagggcgtgcggtgtgccggcgagctgcaacgacaacccagccggtgaagaaaggcaagaaagtatgcttaattttgctttaaattttcaaaatctggaatgattcaacccattggaaatttagcgtagttaaaattttgtgtgtcagctagtaatctatcatctctactcggctgctcctagaattgcaagtttgcaacatgtcaaaaagaacattgttgaatgttattaaagttgcagcagtagtactcctactatagagaacaatgagaatacaaggcaacctaaaatggcgagtgcagttttgttgctcagatattgttagtgatctaggagtgctaaactaattgtgagtatctgtttgagattagagccaagtgaatattggactgtcgtgtgatgtattttgccttttctttctcaatgttttcatatgaaaccactgtaaattattacagccatgtttgacttgtatgtgagataatgagtttatgttggtgctcagttcagcgcccccccccccccccccatttttctttcctggatctgcccctaagatacatatgattagtgccattaccctcggatgcttggggagtagaggaggtgatgatctacatgtacttgagcacattggatagcagcttgccatcggtgcttgcttgaaaagcactgggctgttttttattttgaaaggaggacaaaagctttgcctcatatattaatagagagggaaaaaattatacaaagtatgtacagggccagtcagaagaccggcccgcaggagagaagttctttaggtgatatctcccaaaaatccgaactcctgcagcctagccgctccggctttgacccaagctctgctttcctctttgatctttgcaagaattgaggctggtgttgaggctgtgcttcgaaagatccttgcattacgctccccccagatctcccaggtgactagcatcagtagagttcgcagaggggctcttggggtgttgggggattcaacgacgaggttccaccagtgttcgatcgaggggcagtcatttcatttgtccatttgaaggtcagtatgcgcccatctctggatttctgtccaaatcctcttagtgactctacatttggccagaaggtgaagcactgattcgtcgattgtgcggcagagggggcaaaccttttgatttcgccagccttgtttccccaatctgtcagccgtccatagcctattctgggtagcaagccaagagaagaatttgcattttggcggaaaagcactgggctgttctcctcctgttgctgctcctccatctaaaaataaaataaaactagaatagtcgcatagataattgaggtgcaacagtgaatgcatgctatgcgtccttatattgaagtaaatagtgcacaaaccttggaattacattttgaagaaatgtacattactgctgctagcctgctactgcgattgacattttacaagaaatgttcacattggccactaatagttatggattgtcaacaaatgtgcaatactgatgagaccaacatttcaacattctcgagaaacgttcagtactgctgtcaactgctcctgacagatctaatgtgcagtttaactataaaccatgaggttctatagcaaacgacaggtcacataaaaagcaggtccttccgtctataaacctagaaacgagacgacacaacaccatcctgtaaaatcaagcgtggtgtttcacaatagaagaccattcatttctctatcatgtaaaagttccccacaaaacaaagtggattcttcaaccaactcgaacttaataaataatcatgggcaggctagacatagagatatgagtgattgttatgcacgaatccaaccgtacagtagcagaatgaagaaagtgggagcctctcaagcgtgtgcgtaccgggatcgccgtcgccgaagcgccgctctcccgtcgtgagcagtcggagagaatattgttgttccggagacggagggagcagctggtgatggcttgacgcgcgaagcagtagcagcccgcaaaggatgagattccggaagcggacctggggacggcgatcgagaacatggggctgtcgccggcgagcggagcagaggcggcggaaaccctcgccgccacttgggctccaaggggagcggcacacgttggctgtcgtcggcgaggaggatggaggccggggtccgaggtcggcgaggcggacgagaggcggcggaaaccctcgccaccacttgggctccacgggaagcggcgcggcgagaccgcctctaggcaatcggcttcgttgcgtacgatgggggagagggaggggtttatttttcgagtgaatttcgatttagtccctctagttaccaaatatttattttagacccctttaactaatattttcacgttttttcttacctttacttcactttagaattttttccccccaaatactggtattccctccatctcaaaatataaaaacttagaattagatataacattttatagtactataaatttgaacaaacttaggccgccgccatcgttcgtctaatgcatagttgtcggatcccaaaactaacgattcagaaaccgacatgtttaactgtatcaagctctggatcagtagattgatacaggttcaacaatctggatcttcatcgcatacatttggtaaagacttcaaaggagatatctttatataaaataataggacattcacaagtttgtggctaactattacagcagaggctatacgatgactcaactctgccgttttactatagaattaaaccatctaactacactagacttgaagattaggtttaaagggaactaacttatgtgattgaactcccagcttcggcaaaaactccaattaaactctgaaaaagaggggttgaagcaagggtgagtacaacgtactcagcaagctattatattaaccaataatgaatatatgaaatggtaatatctgtgtagagctaggtttacttgcagaaagctgagaataaagaggtagaaatcctgaaatgcttgatatgcaacagtatttaagaaaatcttgaattatatttctaaccaaagtaccatatgagtcccgatgctcaatccgtgagcacggctattcgaatagattcaaggatattcatactgcagtagatgtacgctttacccgcagtccacgacttgccaataatcattagcttagtcatggcccagtattaggttattaacaattgtggcacttgttccatgaactctaatccccatgcgctctgaatgtaacgttatcagcagcgagaggagttctggcgttcccggggtttttagagagaactggatgagagaccccatgtcatctcaaccaggttttcataaattcacacacacatcgcgcgataatcaagatatttacctgcgcctcggtaaatatcacatttgcccttcgcggcatatatttgcctccttcgcgaggacttacataagaaccactgtacagaggtaccacactgttaattaacataatatctaggtctgtccccattctagaagctgcggtcgtactcgttcgtttgacataagtacttggtaaacttatatcgaccgagacagtactagccacccggaaatcaaccaaatcttgcgtactgtcccaatctaagttcattatgttttatgcaatctaactaggcagggctaagcaaaagctagcatataactggtttgctatatgttcaagttatgcattcaaaatcatgaatggctaatgcatagaatagagatatagaatataggataattatgctcaaggggaggaataataacttgccttgctccaacgcaaatgaatccaagataggcaacctgattatacgattctcgaaataccataggttgccatccaaaagacaatagtctttactgagaaagaggaagaaccaaattcaataaaagccataaaataataagaaaacgataaacgactaagagggctagggtttaaggtataacctatctcttttatagggtatagggattatggggctagtatttgctagtggtaggttttggtagtataatagctagggtttagttatatgggagtcgactgtggagtaggacagtatctcggctaggctctatattttatgtggaggctctcgtggtttggacgataggaaatatactgaatagttgatatggttaaataggcatgtggctaatatgggttaaggttggctttgatagaatagtggctaaggtttagttgtttaggccgatatcgaggtaggataaatatcggctagggttttgggtgtttgctagtcgtcgctagagttggacaacatgacgactaggtttggtattatttctagccgtgtcgatagacaacatatcggctagaagaataggaggtgggtgcaggtttagtggggcggaagtgttactccgacaaccgtgagtggcggcagagcggctaggatcacacagagctcaagagctaactgtgcggcgtgcaatggaggtcgaggggatagtgaagctccgaccgctgtacgcatcaaggcgtggggtgccaggagcagcacttcgaccttaggtttggtttttgccgggctttacaaccaacggtccgacgttgaggtccgtagaccgcgcaaacgtccccatggaaggcgtaaagttccaaccggcggctttttagtggctaacgggcattttggaaataaaagaaaatatttgaaaagcaaatataagtttaaattgtaaattcaattataagattaaatcaaatatttattcaaatggcatttgaataaattaaggaaattcaaataaaatcttaaaatagcaaatttgatatcaaaatgaagagttgaatttagatgaatttaggtccaagtttcactagaatcggatctacggtttaggagatatgtgcttctaaagaataggatttgaattaaatctagaaaatgagaaaagtcactgtgcaggggcccacctgtcagtctttctttttctttttcttctccttcttctttctcccgtcatcttcttcctctcttcttctttttcttgccggctacagaggagagggagagagtgggcgccggctctccggtggacgaaaggcggcgacgtcggcggccacacatgttcccgagcacgacgcacccggggagggcggtggctggcggagagagtgagggagatggccggaacggcgagtagaagagcttatcttcggcggcaaagagaggtggcggtggtggttgctatggggtgggggagaagggggaaacaggaaaaatggaatcacctcgtcgaggcgaactcgatggcgcgatggtttggcttgcgaagctccggtgagggagatcgggtggtggcggccatggccggacatgggagagaaagagagatggagctctgattgtatgtagagaaggggagggatggccggctatttatagggagagaaggcggtggggagaggcggttctggaggaggagggaaagaggaacacgacgacgacagtggcgtgaggaggaggatgtcggcgccgatttatgtttcttagcggcgacgtttgcggcggcgtgcgccgtgcacggcacgcgcaccaggaggcggcggcggctcggctggggtgtgggccgatttgggccggctcggcttagctgggccggcagcccaagaaggaggaggaaaatagaagataaaagaaaagggattgggccaaaaaggaagaaagaatggagtttcggcccgatgacaaaaagaaagaagcctaatttgaatacttgatttggataactaggttttgcaaagaatttgaatttggaaagaattcacaaaagatatttcctaatttatttgagtgcaatatttagaggtggagtttgagggaatttatttggaagcactcaaataggaatggaaattaataatattcctcaaaatatttttgggaatatagaagggaattagttgaaggcaataaataggatttgaactctaaaattggtgttatgtatatttgtggctaaaaggggaagttgagtgaagaatataaattggaattttcttagcacaagagcaattattcacaatatttgcaataatacaattcttgtgccaaagaggaaatcaagctacagaaattaaattggtggctagatcaaaaggaggaatttggatatttggatcaagaatcaaaggatgggtttaagatcaaaggatgggctaacaattaattccaatgagattggaattactttggtctaggttcaaggacaaaaattggaggatttcttggaccataattcataataataaaaatggtttttaaactaaatttgaataaaagagttttagtcgaaagaaggtttaatatttgaaaatagaatttcaacaagaaataccaaatatgtttttaaatgaaaaacacaaaagggattaaataccagagaggttttatgcgagttagttttaggaggtccctctaattatattttcctaggtttagaaggttattaagaacataagaatcagcatgatgcaagattagaaaatgacacattttcagaatgttacaatagtgcagcgaggaggagatcaaaagaggaaaagggcccatggggtgaaagaatttaagaataagctcatcagctaataccagaaatcttcaccccctaaattttacaaaaccgtgtaatttgggtcctatagcaatataggatctctaatttcgctgatgtggcatcctagtcatcaaaataataatacaaaaaattatgggatccacatgtaagtgagaaaaaaatgtgggttcccatctcttctttcttctccttttctcttttctttcttctcttcaactggcggcaggagggacgacacgagcgagcgggcggcagagggggtagacgcttggtggggtagcggcgggtaaagcaggtaggcgaggcagagcagacaacgggcgaaggagggggcaacaacgatggaggtggccgtaggaggagcagcggcgagcgaattccgcccggcgacgatgacttcccaggctcgccgaagaagaaaagaaagaaaagagaaaagagaaaagagaagagaggaaagaatggatgcagaccccacatttttcttcttcccacttacatgtgggccctagaatgccaagtaggatgctacgtcaacaaaacacccatatatactgccatgggatctattttacacggttttgattatttgaggggtagatatttctgttggcaattagggatgttatacagactcggcgtaaagttgagggacaacaagtgaacttgttccaagaaattaccctcctcgacatttggcccacgaattcttttttatgataaaattgccacgcaagcaacacgttagcatgagtggaccaaattaacgtgccaaaccgctatcccggactgccaaagtactatatttgcattggttttgtgagttgaattgcaccgcagttgagaggcgcaaattgaattcgacttatacttaagggatattagtggactttattctttttgttcctactagttgtgagcagagaagcctcgtaaacatggcccacctagtgcgtgggcgtctggctaggcacccagggtccaacccccggctgcgagcgtaccggcgtacgtgtcaacgcgaggcgttgacggaaagatcggtagaaaactaagaggctaatcccctcgtggttgcgcacggcaatgcatctcgccatgcgtgatgcaacgcgcgttcggaatggaaatgattataaaaattcaaagcattatcaaaacgcagatcaaacaggaagggattcgattgaaaacaaaaaaatttactcagcttatgtttagcaattccataatctttttacagcgtccatggagagctttgctgtcgacaagaacaaagatatagctggtacgtaatatggtacatgagctcctttatatagttctctccttattctaatggagtaatagcaatatgattaggttatgcttttaactcaatatctaatgatcagcaacagtaatcgtgtcgaatgattagccttagaagcaaacaatatcacaacaacgtaacatgatacactttacgcggactacactttaagtttcaacaacataccaaccagcgcctcagtgttatcaaaataacaaaagtacgtcaatttctaacgtacattgacttggaaatttttcttatgagacagtaaaaataataaatgaggtcgcccactgcttccttgttttttctttttttgactaaagggcctgggccctccatttacattaacagaaatgaactaggattacagaagtaaacaagagttttgcactgcttccttgtttggtgtatcatagccaagagactcaaattacaaagcatttcctgagctgaaaaggaagtttcttgacagtgaagacatcatcgatgagattgcagttgctaagctgataatggtgtaggatcgaatcacaagaactaagccaaccagagggggggtgaatggttggtatacccaaaaaccgaaaaacttttagcggaaataaaagttaccctcgaaatcgatggatcgcggtctaaccgaagtagttgcgccggtctgaccgcctgatgaacgtcggtctgaccgatgtagattgatcggtcgaaccgccgagaaagcctgccgacgactcctgtcgccgccggtctgaccgccgtgtgttcgccggtcggactgccgcgatgccaccggtctgaccgccggtgcgccgccggttagaccgccgaaacccggtgaaacacaaatcgaagaactcttaaagtggatgacgactttattacttctctctgtgtttacaaagtgcaccaacagcactccttacaaaaatttcgactaaactcaaaaccctaactcaaaactcaactcaattgctctcaaaagcgatacagggaagcctcacgctccccctctatttatacatgaagtaggcagcctaaagccacgaaccaaactcatactaggagttctaaacaccttaggaaacccactagtacaagaaaaaaactttacataaccaaacgtaccaaatttggactccttccaaattcgactccgcatcccatacgcacacaataactccatcgtatgccatatggaatctccatcaaccacgtgtatcaactctagcctaagtatcccgcatgatctctgaccaccacggacgtcgtcttatccccaagccgactcccggtccatcaccgcaaatactctcccgagacatcgagtcacctacacatggaacaaacaaagaaaccatattccgagaccaagctatctccaacttgactcattagcagcaaacaatagtattacatacgtatagtatccatctagaagtaataatgatggaataaactcggatatccaaataaacaacccgaaaccgaaaccgacacagtgtcggccggtcagaccgcgggctgcgccggtttgaccgcgcattacacgccggtctgaccggctaccagagcccagtctgaccggtccacataaaaccacagcagtacctgtatattcacctgtgaatccaatcatctccaaaaccacttcgtgaataaattccaaataacaaaaccaataatctccaatgcccaattgttcatcacagaataataatcaaaaacatctttgattttacaatctcccccttgatgaacacattggcaaacctataaaaatgttttgatatttggtggtaaaaagcacacttcgtacaaatgtacacatcgtgctcaaaaatccaaaagaaaacttctccccctttttaaaagaaagaaattcccaattgaaccaacaacatgctcttctcattacttcaaagtgaattttgaaaagaaagtgaattttccaaaaatccaaaaattttcacattacttacattacttctccccctttgacaatgatttcatcaagcataggaattatgttcattaatgttcaagagcttagcatacatatagcatatcaagtcatgtgttgcaataaaaagaagataaacccatctataacaaaacaagcatgcattaaagtaaaaccatgaaccaaagattttacaattaagcttgaatcaacaatcaaaattcatgatttcatacgatttataatacaacattttaacaagcacataggttgaagaacaaacactaaacacatatacctattgcattgatcactctttctcaaataaccttttagcacaaaataaccaagagaattttttttaactttttcttttcttgagcctttttgctcatatttttctctttttattcagggtacgtccctgtcgtcaagactgtttccagggattcggcacccattattttgctcacatcgaatacgtccttgtcgtcaagactgtttccaaggattcggtattcatttttttcatagttttattctcttttgcacaatgagcaattaaagctatttgaggaataacaagtcaataaagcatatatataaagcatttatagatcaaaccatatggtagcatcaacattgcatatttgcttaattcaagtatagaatttaagtgtcatgcatcatctcccttaaaagcaaaatctaaatctcatgaaaagactagaatacatacaagctatgctagagacaaataaaccttcaaagtattgctagcatgcacaagaaaataccatatgcataaacaaagctctcttttctcaagtttttcattgtcatattattgcttgataaaaccatgagatacaaactcccactcaaaccatgccaaaaggatgaattatacccaattcaccacgaagaaaagcaaagcgattagaatccaaaggtttagtgaaaatatcagcaatttgcaactttgtgtccaaaaactgcaattcaacatctcctttctcaacatgatccctcaaaaagtgaaaacgaatatcaatgtgctttgtgcgtgagtgttgaacaggattcttagcaatattgatagcactagtattatcacaaaagagatgtactttctcaaaagtaagatcataatctttcaaagtagataaaagccagagaatctgtgaacaacaactagcagcagcaacatattcagattcagcagttgattgagcaacactagattgtttcctagaagaccatgcaatcaatgatgtaccaagaaaatgacatgttccactagtacttttcctatcaattctacaacctccaaaatcagcatcggaatatccacttaagcatatagaagatgaagtagaagaccaaattccaaactcaagtgtatgattcaaatacctcattattcgtttgaccgcttgacgatgtgaagcacgaggagaagcttgaaagcgcgcacacaaacacacagcaaattgtatgtctggcctagaagcagttagatacaacaaagatccaatcatacttctatattccttttgatcaacagcttcaccatcttcatcaggatccaacacagctgtagaaccaattggtgttgaaattggcttgcaattctccatcttgaaccgtcgcaaaagatccttcgtatacttcgtttgatgcacaaaagtaccttgaggtgtttgcttaatttgcaatcccaaaaagtacgataactcacccatcatgctcatctcaaattccctgcgcatagtctcagcaaaatctacaaccaaggcgtgagtcgaacaaacaaagataatatcatccacataaatctgaacgaaaagttgattatcaccatgcttaagaacaaaaagcgttttgtcaacctttcccattgtaaaacctttcgcaagcaaaaagttcttaagcctatcataccatgccctaagagcttgtttcaaaccatacaaagctatagacaatttaaaaacatgattgggaaaatcaggattttcaaaacccggtggttgtttgacagaaacttcctccagtataaaaccatttagaaaagcacttttcacatccatttgatacaatttgaaaccttttgaagcagcaaaagccaacaaaagtctaattgcctcaattctagcaacaggagcaaaagtttcatcaaaatccaaaccctcaacttgagtaaaaccttgagcaacaagtctagctttatttctcacaatcaaaccatcctcattttgtttatttttgaaaacccacttggttccaataatattatgtccagaaggtggttcaactaaagtccaaactttgtttctctcaaaattttcaagttcttcatgcatggcgttaatccacgattcatcagttaatgcatgtgacacatctttgggttcaaaagaagcaacaaatgcagaatttgcacaaacatcatgagtcgttaccttagaccttgtagtccgctcacctatattaccaataatttgttccggcggatgtcgtcgttgaatgtacaaaggagcagcaacttctgaagttgatccacgttttgttccagtactggtcgaagttgaattctctggaggaccatctcgatctacatcaacagtacccgaacccgacaaacctggccggtctgaccgctcctcatgggccggtctgaccggaggtgtgccggcggtctgaccggcctggtgcctggtctgaccggccgagccgacctcgtcgtcgtcgtcgtagtcgctctcgtcttcaaaaatacgaccatcctccccctgaacctgtgacagtgtacctgcaatatcgggtctagtaccaggactagcctcatcaaaggaaacttcgcaagtctcaacaattttgttagtccctaaaataagtacacgatagccacgagtatgtgcggggtaaccaagaaacaatccatcggtagaacgtgcctcaaacttatccaaatttccagatttcaagacaaagcatttgcaaccaaaaacacgcaaatgtgaaactttgggttgataaccaaatcaaagttcataagaagtttttccaagtttagaacgcaagaaaactcgatttgaaatatagcaagcagtgttaatcgcctcagcccaaaattttctaggagttttgtattcatccaacatcgttctagccatctcaaccaaaacacgatttttcctttcgacaacaccgttttgttgaggaacacgaggagaagaaaattcatgttcaagacctctttcgttgcaaaattgttcaaatgaagcatttttaaactctccaccattatcacttcgaattcttttcaaagaaccaggaaattcaagctccaatcgaagaaacaaaccacgaaagtgttgaaaagcttcgtccttagttgccataaagaaaacccaagagtatcgagaaaaatcgtcaacaataaccaacacataccactttcctccaacagattacactctagctggaccaacagtgtccatatgtaatagctgtcccggtgcatccgtcatcacagaaacaataggagcatgtgaagagaaaccatcttagcatgacgacacggtgtacaaaccaaatcaagatctttcttaagtttaggcaaaccacgaacaagatccaaaccacttaacctagtgagatgatcaaaaccaacatgtccaagtctacaatgccaaaacatcacatctttatcaaacttagcaaccaaacatgttgtcacaggtgaaacagaattttcaaaatcagctttaaacgctcttccatagcgagaaatattcagcacagaatcaccacaagaatcaaaaactttacttccagttttcttaaagtgaacctcagaattttcatcaacaatttgtgaaactgaaagcaaattgtattttaaatccttaaccaaagctacattcttcaattcaaatttttcatttaccttaaccaaacctatagcgacaacggcactagtagaagcatcagcaaagacaattgattcagtcttggatgcctttttgagggaggagaaccaatttttatcaccggtcatgtgccgcgaacaaccagaatccacgatccacacgttctccttccttgccaccaaagcctacacaacagcagaagtcgaagcctcagtactggggttagataataaaaatttaggaatccagtactgagacacacgaccagaagatccaataggcatatatccacgtgcaaaatcaattttagaattttcagaaaaattcctccgaggccggtctgaccgaagtacagtggccggtctgaccgggggccggtctgaccgcctctgtaccgccggtctgaccggtgtccggtctgaccgaggctgttcagccggtctgaccggtcgccggtctgaccgcgggacccactgcggtctgaccggtttcctcgagggaaaaccagatttttgccaatttgattttgcaaaagcaatctctctctcctttttctgtttatgagctaatctgaaacaaaaaccaacaatatgtccatcttttccacaaaaagaacaagtatatttctcacgttgtttagacacattgttagaactagaagttttagcaacacaagcagaaacaagaggttttgcatgcacaacattggattttgaagaagatgcattcatggtagacatgataccagcagatttaaacacagttttattagtatcatgtttaatcaaaatctcaccacctctagcaccaacacctaacacaacaggaggatgtctagagttatgagcataaggatcaaaacctaaaccacggttatttgtgctaacctttaattgatccaaaatcatattgagattctttttgccatcagaaaatcttagcaaggaatttttcaaataagaaacctctttttccaaattagcacaattttcacaatctaccattacacctttgcttttacgacatttggggaaagaaagcacttcattgttttttacaacatcttccatatactcaacacgtcctaaagcatcttttagtttcattttatttaaattacatgttgagcaatccaaaacatcatgaggttgttttaactttttagcagaaatcatgttaaacatcaaactagcatgaaaagcaatttgatatttttgcaacaactttttagttaaaaacaactcatccaaagtgcgtgtatgcaaagcaaaactacaagcaagagaagatctatttttcaaatcatgtgcagcattaacatctctaatttttgaaatatcattcattaaaacctcacaattttcacaatcatcatcatttggaataagagattttaatctattaatttcatatttaagagattcaatgataaattcctgttttttatacatcttctcacactatttactttttgcactcaaaatattaatagcttcctcaaaagcactcacctcattgtcttcttactctgtgtcagattcaccacgtgccatgaagcaaacatcagagacattctttccattatcatcatctccactttcaccatctacatcacttagtggctcgaaagcggcgcaaacttgttgaaaagccttcctaagattctccatcttcctcccttggttagaaccctttgacttgttgtagttgttgggcttgttgttattggtcttctcaccatctttgtcttctcttttgcctctcccaagcttaggacaatgcgaacgaagatgatcaattgaatcacattcaaagcaacgatttggaccacctcttttcctgttcctggcattattcatagctcgagcaattctgttagcgaccaaagccaaatcctcctcctcgatttgttcgagttgatcatcggatgtggcattaaaagcagcaagaaaagaaggcatagatgaagaaacatcaacaaccaaagaagaagaagaagaaaccaaagcactcgatttagaatcaactttgcgagaaagaatattcatctcatgtgttttcaatttagtataaagtgaatccaaagtcaaagtagacatgttaacagactcctgaatagatgtaactttcatatcccaaatagacatgtcgagaccattcaaaaagtgacgagaaatcttagattgtggataattagcatcataagaagaatcaacagatctaagattactcaaaattttattaaatctagaaagatagtcatccaaagcctctccagatttcatctcaaatttaatgtactcctttttaaaaagatctcaacgaagctctttaatattatttgttccttgatgaaagtttttcaaagcattccaaatctcacgagcagtttcaagatgtgcaacacgatcataatcagaacgagaaatcccactcaaaagaatattacgagctttgcaattattttcaaattcagtttttaaagcatcagtattaatggcttcaggaatcacataaggatgagaaactttcctccaaatatcataattttcagccataatgtaagattgcatcttactacaccaatgaggaaaatcagttccatcgaaaatatgaggcttagttgaaaacctagcgggagtagccatggcaaaaaaaactttagatcgataaaaatccaaaaaagaaaacgaggctctgataccacttgtacgatcgaatcacaataactaagccaaccagaggggagggtgaatggttggtatacccaaaaaccgaaaaacttttagcggaaataaaagttaccctcgaaatcgatggatcgcggtctaaccgaagtagttgcgccggtctgaccgcctgatgaacgtcggtctgaccgatgtagatcgatcggtcgaaccgccgagaaagcctgccgtggactcctgtcgccgccggtctgaccgtcgtgtgttcgccggtcggaccgccgcgatgccgccggtctgaccgccggtgcgccgccagttagaccgccgaaacccggtgaaacataaatcgaagaactcttaaagtggatgacgactttattacttctctctgtgtttacaaagtgcaccaacagcactccttacaaaaatttcgactaaactcaaaaccctaactcaaaactcaactcaattgctctcaaaaacgatacagggaagcctcacgctccccctctatttatacatgaggtaggcagcctaaagccacgaaccaaactcatactaggagtcctaaacaccttaggaaacccactagtacaagaaagaaactttacataaccaaacgtaccaaatttggactccttccaaattcgactccgcatcccatacgcacacaataactccatcgtatgccatatggaatctccatcaaccacgtgcatcaactctagcctaagtatcccacatgatctctgaccaccacggacgtcgtctaatccccaagccgactcccggtccatcaccgcaaatactctcccgagacatcgagtcacctacacatggaacaaacaaagaaaccatattccgagaccaagctatctccaacttgactcattagcagcaaacaatagtattacatacgtgtagtatccatctagaagtcataatcatggaataaactcggatatccaaataaacaacccgaaaccgaaaccgacacagtgtcggccggtcagaccgcgggctgcgccggtctgactgcgcattacacgccggtctgaccggctaccagagcccggtctgaccggtccacataaaaccacagcagtacctgtatattcacctgtgaatccaatcatctccaaaaccacttcgtgaataaattccaaataacaaaaccaataatctccaatgcccaattgttcatcacagaataataatcaaaaacacatttgattttacaaatggatcataacaagtgcctcgaattacacatctccatagctggaaataaagaacacacatgtaaaaacctctgttgatattataaaatgcaaaaaaaaaaaaagaagaagaagaagaagaagaagaagaagaagaagctcatagccttaccctctaaggcaattttagcatgctctcggtctcactggacagaagcagcagcgggtctgtagaggggaaaagattcatagctctcttcgccttctcagcgatcattttatcaattgtatccctatacttcataatcagatctttatggatcctgtaacactagataaaaaatttccatgaacataaattaaggtgcattggcatactcaaagcagaatggcaattaccttatcattatctgtacatgtttcgcccttttcatcccgcaaaacttcttcattctccacttgacaagacttcgctgttaatgctaaaaagccatcaacatacaaacgcactttaacctccttctgaccttcttttgaacttagttttagatgagaggtgtatagttgattgtgatggtcggtgaaaactttaacctctccttcaacgatagggatctttgctgagtaagaacttgcctttaaggaaatttcagctgcacatggtacctcccaattatgcatcagaatatggttaatgccacccataacaaccacaccaacagatgcattcagactgttgcaaatattggaccacagattaaatgggccaactgggccaaacagatatacacaaagctcaatacaaatatgaagaaagcaccctcaagaagggagtaaatacacagctagctatacaatacatctaacaccccccccccctcaaactcatggtggatcaaccatactgagtttggacaaaaaataactatgttgagctcgagtttgcgccttcgtgaagaaatctgctaactgaagctctgaaggaacatactgaagagccacaacctcattttgcacctgcgatctcatgtatgaggcatcaacgccgatgtgtttggttagctcatgcttcactgggtctcgagcaatgctgattgcaccagtactgtccgacaagagtggagtcgggggagagacaaaaactccaaaatcctccaggagccaacgcagccaagtgatctcagcggtcaaggctgccatagctcgtaactcagcttctgcacttgaacgagaaactgcagtctgctttttggtcttccatgcaatcagagaggaaccaagaaagacacaataagcagagagagagcgacgatcagagtggtcactagctcaagtcgcatcagagtacgcctgaagctgcaatgaactggagcaagggaagaaaaggcgacgggagatagtgccacgaagatatcgtaggacacgaagaaggtgagtgtagtggagctgagtaggggcagaaacaaactgactcagaatgtgaactgagtgagagatgtcagggcgagtgacgccaagatagacaagactcccaacaaggtggcgatagcgggtgggatcttgaagaggctcaccatcattgggccgtagatgtatcccaagctccataggagtgtcaaccacacgcttatcagtgaggcccgaacgagcaaggagatcctgaatatacttctcttgggagaggtagaaaccagaagacgtggaagagaactcaatcccaagaaagtacctgagaggacccaaatcagacatcaagaattggtcactaagacgcttcttcacaagattaatgaaccgagagtcatcaccagtgatgatcatgtcatcaacatatagaagaagaagggtccgaccacaagaagaagtgtgaacaaagagagcagggtcatggtcgctggctttgaagccaatatcagtgacaactgaggagaagcgctcaaaccaggcacgaggggcctgtttgagaccataaagagaacgacacagacgaagaaccatgccatcagggacagaatacccaggagggggctgcatatagacctcctcatgcagctcaccattgagaaaggcattcttgacatcgagctgagaaatggaccactgacgaatagaggcaacagctaacagggtccgaatggtggtcatgtgagcaactggagcaaaagtctcaccatagtcacgaccatgctcttgctgaaaaccacgagctacaagacgagctttgtaccgctcaagagagccatcagagcgagtctttatcttgtagacccacttacaagtgataggagtgacgtgagtaggtgcaggaacaacatcccaagtcttggtacgctctaaggcagcaatctcctctgccatcgcctgttgccactcctggtgggcaatagcctctcggtaagtcgtgggctcaacaatagccgcagcagtaaagccatacttaggcgcaggcctaatagcatggcgatcacgaagatcataccgagaagcaggagcaggagctggtccaaggatagagggagaggacaactcaacaaggggtcgtgaacgacgagagtagtgcagcgaaaaaggtgctagctcatgtggagcatctaaaagagtactaggaggtggtgatggtagtatgggtgatgatggcatcggcgaaggaggtggtgacagtgatggagatggcgtagaaaccaaagggaggtgtggtgatggagacggaactggtggtggagaaggaaaggaccaatccggaagagtcaaaaaggagatagatttgacagtggaggactgatcacaagtggaagagcgaggatagtaaggacgagactcatcaaatgtgacatgacgagatatcctcatgcgacgagcaacaggatcatagcaacgataacccttatgctcagtgctatacccaaggaaaacacactcaacagactgggcagtcagcttggtacgctcacgaggagaaagaagaacataacaaacacaaccaaaacatcgaagatgactgtacctaggaggtgtaccaaataggcgctcatagggagtacaaccatgaagaacagaagaaggctatcgattgataagaaaaacagccgtggagacagcctcagcccagaaatgaggcgaaagatgcgaggagatcattagggcacgagcagtctcaagaatgtgacgatgcttgcgctcagcagtgccattttgagcatgagcaccagggcaagaaaactggggaagtgttccctgctcagctagaaaacggcgatgggctgccgaaatgtactcaccaacagagtcagcacgaaaaacccgtatggaagaatcgtactgagtgcgaaccatagtagcaaactgctgataaatagaaagaaattgactacgagaagacatgaggtaaatccaagtaaatctcgaatagtcatcaataaagatcacataataggaatggccacctttcgaaacaaaaggagcttgtccccatacatcagagtgtataagatcaaaaggacgctgagactctgaggcactagaagaataggggagttgcagctgcttgccaagcttgcaacccgtacaatgtagagcggtgtctccagaaacaggacctaagaccccaactaccaataagtgtggataatctagcaccggatagatgacctaaacaacgatgccactgagcaaaagtagtagtggctgaagtagctaacgctgaagcagtggaaccgactgactggctggtagaagcatcagaagggagatgtagccaatcaagctcccaaagacgctgagagtcatggcgcctaggaccagtccccaccaggagccctgtgcgacgatcctggacacaacaagagtcagcctcaagtataatccgacaaccatgatcagtgatctgaccagcggacataagctgcatggttaacttaggaacatgagagacagtaggaactcgaaaggaagaagtagaaagtgtgccacgatcaacaacaggaagtgaggtgccattagctgtctgaactgtgagaggggtatcaggaggactcatagaagaaagatgtgtggaatcgggtgtcatatggaaggaagcaccagaatcaagaaaccacgaggacaatatacctgaagaggatggaggtggtggtggaagactagaagcctgagcagcagacccatgggtggaggtagaggctgtagtcataagacgacgaaggagccttacaagctcttgctcggtcgatgtgatctgctgagagcttgactgagaagagccctgtcgagagccctgagaggtgcgatgactctgatctctcttcttcttgtagcacatagaggcggtgtgccctgtcttgctacagtacccgcaaacaatgcctgaaggagtactaggagcaccagccgcaacaggtaaaggtgatggcaccacaacaggctgggcagagacatggacctgagaaggcaagccctgtgcaaccaagacagaggtggactgctgtgcaatgcctataccagcctcacgacaacgagtctcttcagcccgtagctcaggcaaggtctccaacaatgaaggtcgagggcgtcgtgccaacagctgagctcgaacaggctcaaactcaggcctcaaacgagacaagaactcatagaggcgagtggtctcagtctggaccctctggcgctgacaacaggtacaagtgcgacaaacatcagcgccctgtaggtccatttgacgccacaccgcagacatcttgcgaaagaactcatccacagtggcatcaagctgacgaagagattgtgcctcattcacaacggcaagaaacatggcatcgttgcgaggctcgtactgctagcgaagacgggtccacatcaactcagagctagcaaggcccgcaatgtcgagtgatatgtcaacctccatgctcccaaccaaaatagccttggcataggcctcctgctctaaccaagtctcatatagagagagatctgtttgatacgcctccatagcagcagcaagatcatcaaggagaccacgcttagtgttctcatcagcatctgccgagatggcaggctcagcaggcaaggttggacaaggcgggcaaggccgatcgccgatgaggtagccccacaaccactggctgcacatgtgtatctgcatatgcaatgcatactcccggaagttgagtccgttgaagatgaccggaggcttcagaagagaaatggcacccggttttcccgagggcggcgccatcacagtagaggcagtagctttagacggtggaagatgagggagaagcaggcagcggcagcagaggcagcgcccgcccgtggccgcccgcccgcgagcaggaacggcggcgcccgcgagcaggggcaggcaacgcccgcgagcagaggaaggtggcgcccgcaagaggggcggtgactccagttggcgtggcggcgaccccaagaggcagaggcgcggcggcgacactgccggcgcggcggcgaccacaggcgaggtcatagggcagaggtggcgacgctcgcgcgagagagaagagggatccagtcacgtgagaggagagagagagcttcacgacgacggcggcggatgtggaaccctaaaccatatgctctgataccatgttgcaaatattggaccacagattaaatgggccaactgggccaaacagatatacacaaagctcaatacaaatatgaagaaagcaccctcaagaagggagtaaatacacagctagctatacaatacatctaacacagactatgtgatatggtaatcgtatcaccatctttaacagaaagcttactgtccgtgtaagcatcgccttttaaaaacacaattgacttcattgcgacatttggatctgtagtccagcactgatttttgtaaaattcattgcacttggaaaattcttgctgttgaaagtcccaaacctttgatgggaggtgaatggatttcaaaattaattcagaggctgtagaccacccgttaatatgtgctgctcccatatcatccagtgcttgaagccttgcaccaatatgtggattgaaagaatttaacacaagacttgatatatatttattcttcaaagtctcagctgtatggatgatcagtgcagccatcgagcgcttgtgtttatctgaatagttgtttggatcaaagtgagccaaattctgcagcatatccctcattgtactgtatactacttgaaacagaggcagtctgttaggtccaagaagagaaccataattgctatcatgccgtaagagaacagatcctctaatatacttttttggattgagttggtctttcctattcacttgcttctttttggatccacatgctgctttgctcttttctttttgtttgcagtgcttgttcatccctcggtcctttatagccttcatctttgggtcctttataaccttcagtttttggtcctttatagcctcttcctcatccttcacctcctcatctcttgttttgtcattaccattgaactgattattcatttcatcagtcttgtcatccagattagcatccttcccttcattgccgtgttcatcattaaactcaaaaatgtgtccgtctgcagtttggaaacctctcaaccacatatttctctcttcaattatggcagttactctgttagtaccatcagtgaaagcaatggtaaaaacatcagggccttcaggggtaagaacgaactcctttctcttagaacctttgaccttgacaatccttctgaacctacccgtgagatacgttcgggccttatcaatcttgctggtgaaagatttatgaactctatccaggtcattgctgtggctcaacctcaaatttagtgtaaacaatggttcatctggcatgtcataaattccatctgattgttgataatccattcgctacaatgattcttcagcctaaagtgactgccccaacgacaattaaagcatcaaacatgttcaatattttcgaacttacatttctatggaagaaaatcgaagacaccaatcatgtcaaaagaactactgaactatagagtaaacatgtaaatgaaatgataaatgctaagaggtgactacttagtgcatagcaagagggcaagaactgataagatcaatcaaagttcataataaccaatttattttaggcagtcctataacaccatttacctaaaaacgaatacgtggacaactatttttaagcagtcctaccaattcctctaccatatcaaaaggacaactacttttacatagactcgactcagttcttgcgcatagtccttactgacctagttatggatgacattgaccccactttcatgaaggtactgagatgaataagtatccagcaagaacacaacatgccaacgagagcataagagaaatggacaagctaacctagtacaaaatgattaaaccaaacttccatcccagtccgcaaaagatcagccataaaaaccaattgaaatccacaaggcatttgaacttaaattaaaccaacctacttttcagggatactggattaacagtttaacacgtttgtgaactcattctttcctcatcacctaggcagccccataaatagcacacaataattttattagagagtaggagttcttttgtgtcagatgctcttgagcctatatactcccaaaataacaataactcaccaacctgatcctaaagccaaatttcagcatgcctcactagacaatacatatcacatgaacaatagcgctatatcaaattgagggtaagggatccatatgattagtatcattacccttagatacttggagtagagtagatagttgcttggttgaaaaacattgtgttgtttgccttctccatctgctgttccttcatctccaaaatatatattagattagtggcatagataattgagatgcatgcacggtatgcatccttgtatcaaagtaaatatgcacacaaaccttataattacatttagaaacgtccattactattgctgctattggcacttagaattaaagataatcaaaatactgcttgagagttgagaccaacagttcatcatttaataaataaaacgtctactactgttgtctgctgctcttgacagatctaatgtgcagtttaactataaaccatgaggttctatagcaaatgacagtctataaacctagaaacgagacaacacagcaccatcctgtaaaatcaagcatggtgtttcacaacggaagaccattcatttctctatcatgtaaaagttcccccaaaacaaagtggattcttcaaccaactcgaacttaataaataatcatgggcaggttagacatagagatttgagtgattgttatgcacgaatccaaccgtacagtagcagaatgaagaaagtgggagcctctcaagcgtgtgcgtaccgggatcgccgtcgccgaagcgccgctctcccgtcgtgagcagtcggagagaatattgttgttccggagacggagggagcagctggtgatggcttgacgcgcgaagcagtatcagcccgcaaaggatgagattccggaagcggacctggggacggcggtcgagaacgtggggctgtcgccggcgagcggagcagaggcggcggaaaccctcgccgccacttgggctccacggggagcggcacacttgggctctcgtcggcgaggaggatggaggccggggtccgaggtcggcgaggcggacgagaggcggcggaaaccctcgccgccacttgggctccacggggagcggcgcggcaatcgggtttcgttgcgtacgatggggggagagtataggtgtccaaacgggcggcacggcccggcccggcacgggcacgggtccggcacggcccgtttaggcacggcccgttaggcacggctgatgaaacgggccgtgccgtgccggcccacgtgccgagccgccggcccaagcacggcccgtggatggccgggccgtgcccgtgccggcacggcacgcccgcggcccacgggccgttcggggcacggcggcccgtgaaggcaggccaccagcctgcagtgcacagtgtttttttttaaaaaaaaaagcaaagtaaatgtataagaaaaaaaaattaaaaatggaaataaaatgtttaaaaaaaagtaatgatttactaatgttaaaaaatgaaaaaatggtatttaaaaaatggaaataaaagttttttaaaaaagtaatgatttgctaatgttaaaaaaaagaaaaaatggtatttttttgttgtgttgaaaaatttaaaaatatagattgtgattcattattttgaaataatttaaagataaatccacacttgcgaaaatattgtaaaagaatttgttaaaaatagtaatgacctttattgatgtttatatcattacaggatacaatgatacatgctgcctcgttaaaaactttgtcatgtaaaaactcataggggaaaatgagaaaaccatgacaaagaaaagagtacagctcaaaggtcagaactacttctaacaaaattctactggggttggtctggatccaggtagagttgctcgaactgggcggccaattcttggttgtccgcagtgtattgggcatgttgtcgagcaagctcccagtctttaacgcttagtagcatttcgacgtggtcgctgcgcagagtcgtcctccggtcttcgatgattcggccgcatagactgaaggccgattcggaggacaccgtcgacacgggcaccgtcaacacatcccgtgctagttttgaaagcacaggatatgttatcttgtggtcattccaccacccgaggacattgaaatcttgtgcttcgtggtggatggcgtcgctgtccaaataaccggacaactcttcggccacaacatgcgaagaggcgtctacacttgtagccgacgaactgccaccaccttggattgaacttgaagacgatccaccccaaatcctaccccactgtatcttcttcttacctgtagtggggataggagggggtctctgctggcgaacttcctgaaactttacttcatatcttccaaaaacctcatataatttacgtctaacctcagtataaaaagaactataatctacacctatagtatctccaacaagtgataaaatagcagacaatccccttaatttacacctaggatctaaaacaaaagcaagagcatacaacataggtatatttttccaatatttcaaatatttttgtttcatgtgaaagacaggttcagttagaatgtcatcattttcgtattctttaaataaagtagcaatttcaagaaggttgtgcaaaattatattagcagttggataataaacttgtgacaaagttagagtacaatcataaaaagtttctagaaattggtgaaatttttggacaattgcccaaacatgctcgttcagtactgaagacccgtcactgtttcttgggccaccacgtgactgaacaaaatcagaaaggaaactactataaggtaaaacaacttttaacattaaatacgttgcattccaccgatgctctgcatcggtggcaaacttacgagctttcacaccggccgcattgcaaaacctcttccatgcagcaatccgcgggttagaagcagttaaccacgcgattgcttgacgaacagcatcgatgtggtcacctaccctcttcatgccagtcttaacaatcaaattaattatatgacatgcacaacgctgatggagtagaaaagattgagcatacacactaaataaaggttgcaatatttcaatagccctagaattagcagatgcattatctagggtgacagcaaatattttatcagcaagattaaattcattaattacttccctaattctttcagctatgttttctcctgtatgtgagacatctattaacctaagccctaaaactctcttttgtaattgccaatcatcatcaacaaaatgaacaactacgctaagataatcctctctagctctactactccatatatctgaagtaacactaacagagaaagtacatgtactaaacagttccttaagtgcagttgcttccttgtgataaacattctctaaatctctagttgatgtttgcctactcacagctttaaacctagggttatgagattgctgaatgtaatgttcaaaagcaggggactccccaaagttcaggggtaaatcttgcctggcgattaaccggacaagagattcccgagcaaccatgggatcgtactcccaactgcgtaccgtaccgtctgggtttaccataagttgctgctgccggagttgtattccttgcttcttggcacacgactccgcatggcgcttgaggtgacctgtaccaccagaagaacgagcagataaaatttgcctacatattctacaacgggctttcgatacctcccttccgtcggggcatgtttcctttatctcgtcgaagttttgccacacaacggaggttctcgatctcttcgagccggtgtgtgtcgaaacacttccgctcgcggttccggaaaatccttccgaagctgtcgccgcctcaaccggtacctcctcaacgacagccgtatgaaccggtacctcctccacagatggtggagttggagccgatccggaggtaccgtcaaaccccgacatgtagttggggtcgaaatcacccaaggtgaacgacggcgactggtatggaaagttcggatccattctgaaaatttaaaccgacataaacaaattttcgaatatttattgaattcacaaacacaatacaaataatacacaaatttgaatattacttacatctttccaaccgcgagctcttcaaacctctgcgatcaaactgttgaactacgaaactaattttgatttttgacaaaatttgagcaaattttgtcaaaatcaaaaaaaatgcacacttgagaacaaagagagcacttaaaacacttgagagcacaagatgaggagtgtgggatgaggagaaatggctagggttcatgccctatttatagggcgaaatttgagattttttggaattttttcgaaatttttatgaattttttagcctcccaacggttattttcaaatttgaacggtcaaatagccgttagtgccacgtggcgccttcccattcgaccgccgcccgccttgtccgcgcctgacgggccgccggcgtgccgtgccgtgccgtgccgcgggccgtgccgtgccggcccgctacagtagccgtgccgtgccgtgccggcccgcgggctcggccagcggcccaagcacggcacggctactcgtgccgtgccggcacggcccgttactgtagcaggccgtgccgggccgtgcctgctacaggttcggccgtgccccgggccgcccgtttggcccggcccatttggccacctctaggggagagggaggggtttatttttcgagtgaatttcgatttagtccctctagttaccaaatatttattttagacccctttaactaatattttgcattggatttcttttaaaaaaaatgctaacgtacctaagcagaaggagatcatgatgacatgacacactttgaaagatactcctccattcgaaaaaaagattgacggagctcgtggcccctcaccgggagaccgcgcaggcccccctttgccggttcggccgggggctcagggtgagatctcaggctctctctgtatgtggaaagatcgcggcctatccaaagagcaagagacacaggcgacgtatacaggttcgggccgctgggaagcgtaataccctactcctgtgttttggtggatctatgaatgaaggagttacaaagtgtgagccaaactctcccttcttctttgttcgtcaatctccagccccccccactctaaatgggcaaggtcctccttttatatctcaaggggataccacatgcacccctccctttccaaactggacttttcttctcttcataaatgaagcggagatttgcatggttgccctccgaacgtccttctgacgggacggcacatacctaccaccacttctgccggaggcaggctcgttgtgagaacgaggctgtctgctgacgatatgaacagtgtcagaccggtcacaaatcggtcattcttgtccaccacgcgtcagctttgcaacatgtatttcgcccttcttcgtgtaacatcttgcctgtaatggttgggatgaagcctggtattcatctgaccagggctaacgtgccatctctaagaagtaacacgctagctccggctggagacgtgtgcctagaggctctcgtcttgacgggacggggcgaggcgtgcgtcagaccgccagtcgccacctaaccgttgatctgaccggtctgtgactggtcacagaccggataaaggaacgtgctgcactgcgctgcatgcagcatgacgtgcctgtccagtccgcaataaatgcggttaggtgagccctgccgtgttcacctaacccatatatgtggcgcaaacttcattaggggtcggggtgcctcggccgtcggggccggggcaggagtaacccgacccccctcggggaaatcaagaggagggcggacacctcaccctcgggcccgacgtccccgagggtgccgggccacgtgggcgattgtgtctgcctcaagcctctggtcacgatactcccggtcccatatcaccgacagtagcccccggcgttatgccagggcgatcgcccttctcaagggaagcggtcgggcgtgacgccactcctaaagcctggtgacaggtgggaccggtctccatggttgggcagaaacccaacggtctcaaaccatgcacatcggtcatggtaacttggctgtcaataatgggcggtctcttcaagactgccacatctcttgagcagcgcacgaatctgggcgagccgatttgctccgcctggagacatggcaacgtcacttcgatcgacgagcgtgattaacgcgcgcacgatacgatctatctcgactgccgcaaccgcatatccacctcatgcgccgcaagcgggcgaatgggattagtggaagcgtgggcacgagaaacgagggagcgagatagcgagaaacgagggagcgagatagtgggcgcgagaaacgaggagccgggcacagcgatggcaagggtataaagacaccgtggaaaagatttgctcccttcctttcgccattattccccttgccttcgccgcttgcgccctaactctctctctgctgcgcctcaccttcgccacacgcgctcgttctcaatcatcccttcctccggcgccatggcacggggctctgctctgctcgacggtagcgtactaccgccttctcgcatcgtgagcgagaggcaggcggggctgccgcgccgcttcatgccggagtctgccaccggccgggagatagtgatgctgggcgagggacgcccggcacctgactaccctgggcggtccgtcttcttcctcccctttgcaatggcggggctggttccgccattttcttctttctttatggatgttctggagttctacgatctccagatggcgcacctcacccccaatgcggtgatgacgttggccatcttcgcgcatctgtgcgagatgttcattggggtgcgcccatctcttcggctgttccggtggttcttcaccgtgcagtcggtatcgccgccgtcggtggttggtggctgctacttccagccgcgggggccggtgctgaactgctacatcccctgcgccctccgcaagaagtgggacgactggaagagcgactggttctacacccccctcgccaacgaagcgcgcctccgacttccaagccagcccccggcgcaggtctccagctggcgggcgccggtagatctgggggatgactatgacgccgtcctcgaccgtctggcgggcctgcgatcccaggggctcacaggggccatggtgtacggcgactacctccgtcgccggattgcgccgcttcagcggcgcgcccggagcgcatgggagtacaccgggtccgaggactacatgaggacccaccagggagtcaaatgggactgggctcctgaggacttcaagatattggtccaacgggtgctgaatctcaactccgtggaagcatccctcattcctcaaggagttctccccctttgcatcgatccagaccgcgcctccatcctgaccattatgatgggggtcggggcctcagaggaggaggctcctaagggccacgatgccgtgggcgggagccgccgggaagaatctaccccaggagggggtcgtgcttctgggccccgcgacgggggctcggggagcagccgccctgccgacgcccgggggaagaggaaactgggaggaacacctcccccatctcctccccgagggggcggggcggtgcgtgccagcagcaggcgcccggagggggccgcgccgacatcacagcccgagacggagcgcaagaagaagcggctccgcaagacgggggagacggaaccatcccggggaaacctgatttcccctccaatgtggtcgtttaaccgaccccctcgcaggttcgtttcacgccttttgcaaccatcttccctttatcccaaaagcaagttctctcttatccatcttgtctgtcttctggttttttctcccgcttcagtgatatcccgacgcgttcctcccgccatcccaagtccggccagtccgaggccgaagatccggcggccgcagaggaacaaaggcgagaatctgaccggcgagaggccgcagatcgcctacgggaagctgaagaggccgcccgggaggccgctcgggttcgtcaggcggaggataccgctcgggaggaggccgcccgggctcgccaagccgaagaagccgctaaggaggaggccgcccgggctcgccaggctgaggcgatggcgtcttccgaggcagctcacgacaaggctgctggcgcgtcgcttgggcccactccctcgggcgacgctcaggcgacagcctccggggcggctcgcgacgaggccgcgggcgcatcgcctgggcccgctccctcgggcgacgcccaggaccaaacgggttcgggggacatccctgagctcagcgcgtcttcaggcgggccgagccgcgtcgcattctctccaaggcggcttttctcctcgtcttctgtcgccccgctgagcgccgagccccttctgcaagccttggccgccgcaaacaccgcggtgctagatgggttcagcgcccaggtggaggccttgcgagcggagcgagcggagcgagaggccgcatgggcgcgcgtcgaggaggggcggcgctcggtggatgtcatggtggaggtgggccgtaaggctcaccgccgtcatgtctcggagcttgaagcccgcaaagcggcgctggcggagatcgcccgagaggtggaggaggagcgggaggccgccctcatcgccaccactgtgatgatcgaggcgcaggacaccctccgtctccaacacgggagctgggaggcggagctaaagaaaaagctcgacgccgcccaggtgtggagattatgggtaccccatacccacacggcatggttatccgactagttataggggataacttatatttttgtaatatgtaacagatcatgacttgggtgttacgtttccttgtatattacggaacggcctaaagtcctggtttgataatattgtaaagtagatttaggaaaccgataccgtattggttaaggcttctatcttgtaaccctgccccccaacctatataaggagggcagggagccccctctaggggcatgagacaacctgatcgtcagatcaatacatactcggcggattcaaatccccaaacaggagtagggtattacctctcattgagagggcctgaacctgtctaaatcatttgtctctgcatccatccacttttaggtctcgtgcgctacccccttttattattgccgaattcatgtttcgacagttggcgcgccaggtaggggttgcgtcgagtttcctatcaacgagcgcgatggaatcaatttcatgagtcgccgacttcgttttcgctttggggagttttcacttcctttccgtcgaccacttcttcaagctcctcttctctgacttgatccaaatcagtcagggggaaactcaatctgatttttatcattatttatcatattgatttttaatctcagattaatttcttgctattttttgttgttgttcgcatataactacgcggcactattgaggcgattgatgctggtcatggactcgaggcgtctcagctttccggtcgatcggccgcgagtccactccgccggcttgtcctcgccaccgccattgctgatagcaacaacgacttcaccgccggcctgcctccgtcgccgccgactggtgtcatcgcctatacggttggtcggtcacaccaccgttcatgggcgtccatgtcttcaccgaccggctggccttcgccgccgccgactggtgtttccgcctgcacggctggcctattatgccgccgctgttgggcgtctacgacttcaccaccggcctgcctccgtcgccgccgactggtgtcctcgcctatacggtcggttggtcacaccaccgttgatgggcatcgtcatctacaccgccggcctgcctccgtcgccgccgactggtgtcctcgcctatacggtcggttggtcacaccaccgttgatgggcatcgtcatctacaccgccggcctgcctccgtcgccgccgactggtgtccccgcctatacggtcggttggtcacaccaccgttgatgggcatcgtcatctacaccgccggcctgcctccgtcgccgccgactggtgtccccgcctatacggtcggttggtcacaccaccgttgatgggcatcgtcatctacaccgccggcctgcctccgtcgccgccgagtggtgcctccgcctacacagctggcctattatgccgccgctgttgggcgtctacgacttcaccgccggcccgcctccgtcgccgccaagtggtgcctccgcctacacggctggcctattgtgccgccgctgttgggcgtctacgacttcaccgccggcctgccttcgtcgccgccgattggtgcctccgcctacacggctagcctattatgccgctgctgttaggcgtctacgacttcaccgccggcctgcctccgtcgccgccgactggtgtccccgcctatacggtcggttggtcacaccaccgttgatgggcatcgtcatcttcaccgccggcctgcctccgtcgccgccgactggtgcctccgcctacacggctggcctattatgccgccgctgttgggcgtcttcgctttcaccaccggcctgcctccgtcgccgccgactggtgtccccgcctatacggtcggttggtcacaccaccgttgatgggcatcgtcatcttcaccgccggcctgcctccgtcgccgccgactggtgcctccgcctacacggctggcctattatgccgccgctgttgggcgtcctcgctttcaccaccggcctgcctccgtcgccgccgactggtgtccccgcctatacggtcggttggtcacaccaccgttgatgggcatcgtcatcttcaccgccggcctgcctccgtcgccgccgactggtgcctccgcctacacggctggcctattatgccgccgctgttgggggtcttcgctttcatcgtcgaccgccttcgtcgccgccgactggtgtcttcattgttattgatggacgactttgttcccacattggccacttctgccatcaccaaggggaatattacaaagctaagtcatcatttattttattctttatatgatatttttccttttcctctgcctcactacaccaattggtcttccattgagtagtgagtcgggggctacagatgttatatcatattttttataatatttatcttgattgcttgcgacataatctgagtacaaaagtacctatcgagttatggagttctatcttcctatgctttccgtttggtttgccaatggatggttgcctttgggccgattcctagcacccgggggctcgttggatggaccgagtaacgcaaggtgctaagtattattcggaataaatcaaaagcatagagatgagataaatttattttctgctcttaataattgcaaaagtacccgagtagtaaactccgatccgtgaaactttgttccattaatgacgaactcatgtcactcatatgcatgtttgggaagtgcttaggccgactcccagtgcttggtggctatgactagttgggcagagcgtttgaacgtaatgagtcatctgctcggggaaatcaaaattgacaagaggagaaatacatatttataaatattttaaaatacttgattttttctcgagtattatatttatatcagatactactcatcctatatgtttgttctgcaggatccagatccagatatgcataaaagggattcatggctttaggcttatctcttacgctccaggaatggatcagtcagaacatcaccgactggcttgccttcgctgctgccgactggtgtttccgcctgcacggctggcctttatgccgccattgttgggcgtctacgtcttcaccgaccggccgcctcgtccgccgccgactggtgcttccgcctgcacggctggcctttatgccgccgttgttgggcgtctacgtcttcaccgaccggcttgccttcgctgccgccgactggtgtcctcgcctgcacggctggcctattatgccgccgctgttgggcgtctacgtcttcaccgaccggccgcctcgaccgccgccgactggtgtttccgcctgcacggctggcctttatgccgccgctgttgggcgtctacgtcttcaccgaccggccgcctcgtccgccgccgactggtgtttccgcctgcacggctggcctttatgccgccgctgttgggcgtctacgtcttcaccgaccggccgcctcgtccgccgccgactggtgtttccgcctgcacggctggcctttatgccgccgctgttgggcgtctacgtcttcaccgaccggccgcctcgaccgccgccgactggtgtttccgcctgcacggctggcctttatgccgccgctgttgggcgtctacgtcttcaccgaccggccgcctcgaccgccgccgactggtgtttccgcctgcacggctggcctttatgccgccgctgttgggcgtctacgtcttcaccgaccggccgcctcgtccgccgccgactggtgcttccgcctgcacggctggcctattatgctgccgttgttgggcatctacgtcttcaccgaccggccgcctcgtccgccgccgactggtgttttcgcctgcacggctggcctattatgccgccgttgttgggcgtctacgtcttcaccgaccggcttgccttcgccgcctccgactggtgtttccgcctgcacggttggcctattatgctgccgttggtgggcgtctacgtcttcaccgaccggtcaccgcatccgccgctgactggtgtcaccgcctgcacggctggcccattataacgccaactgatgctaccttcttcacggctggctacatcgctgtcactactaataggcatcagtatcttcaacacaagctgcctacgtttgccatggctgccgactggtttcttcacttccatggctgcatgattctgccagcgttgattggccttatcttcttcaccgccggtcgtctcgtctgctgctgactagtgccctcgcctctacatttggtttatacagctaccactactgatggacatcatcgtcttccgttgccgactggttatgccgccgccgactagtgcttttatcttcacaactgcgcgtcttcgctaccagtttgcttctgttgccgccgactcgtgttcacttcatcacggcgatgcaactttgtcatcatggtggagcgacttcatctttattatcttcggcactggcaaactctattgctgctacttcgcaagttttactacttcaccaaccacgacgtctttgtgaacctcgacatctcggcatgcaatgccatgatattttactacaacaagtgactctccaatattcaggatttctacttggacaccttcaacacatatcttcaatcaagcaatgactactcgacgacaagaagctataattctcgactctatgttcagttgtttcccaactaaccaaagagtcgggggctacacaaatataaggctcaaaatttgacaaattttatgtcaagctgaagaaatcaattaatcagccaatgagtcaactccaggagtcattatcttcatctttgcttcggaatagacattctacttcaacaacttcaaatatttcggtttagacgagttgggcaacaacatcaactctcctccaattatttgtcttcacgattggcctactacgcaactgccgatagaggatctcatcgttatcatcggctgctacatcgctattgactggatcaccgacatcgtcatcttcatcaacatcttgtcaagcctcatcaacatagcctactctgctgccgttgatgggaaacttcgtcatcatagtcggctatctctgttgccgctaatcatcattaccgtcggatgcgtttgtcgccgccgattattttcttcatcttcatgattggtggatttcgccatcaccgttgatgcgcgtctacgtcttcatcgtcggtttgcttttgtcaccaccgactgttctttcgttgttgttgggcgcctacatcttcactgctagctgacctgactgttgccgactggtttcttcgcctccacggctgtgcaacttcatcacttttgattggtatcattatcttcactaccactaatatttttgccacctctggtgggcaatattatctctatgttggtcgtcttgtctctatgccaactgcgtcagctaccatcaatggacaattttgactatgacagaaggacaagctatatgctcaggggctcatcaactcaagcgtgaggattatatctccaatttggacttgttccggatacattccacatggattcatagtcatgagtctattttctatgctcaaagactggaccaattattattccccgtaagggctatcaaccgaatacttgcgccagtcgggattcaattattatatttattttggagtatcccataggggataatcattcagatcagaagctattcatatgagctacacttggtctatattacccggaagatttattactcgggagcatgttacatgcgtcatcctttaaagggtgtcgaaggcatattttttggcctaggcctaatatgtctgcagcccatattttcaggtgtggcctgtcacgttcttttagggacttaggcactttttgcttaggccaaagtgcgcgtgatcaagtgcccaataccttaaaatccttttataccgcagttacttaactttttaggagttggtacaatgcatcttaaaaggtgtcaaacagtaaagctttatatagctgtcccgctgacttttttatatagtcaaggtgctgtttgggtttatcaagcaattgattggatacaatatcattgctttttgccacgtaagtgtgcatttttattgaccaatattatggcttaggctgattatatattatggtcatttttcaggcggttggtaaatcctttatgagtttacttactcggatgttataccacatataccatatatttccaggtgtggtgaaaccatgtgtcttttagggacttaagcacatctgttaaagcagtgtgcgcatggcgtatgcccaatactttggaaatttctttattcacaatatacaagcttctttatagctattttgctatatcactcatcatattttacaaagcagttggtatatcacccggatcatgttatttggaggattcacaccgcatatgctatatattgatatcaagtcacttggttgattacgattatcaaaaccactcggttggttggattatttattccttgactatatgcttggtttgttcaattaaccacattgtcgggggctacacctattaggtgcatctagtcggtgcacctgactttatttttcagccttccacagtcttcagatttggtaaaagtactcgggagaccatggcgaagatgattgaagcactcggctttggagtaatctagttcgagagaaggttatcttttcgactgtgaaggtctcaggggctactgtggagattatgggtaccccatacccacacggcatggttatccgactagttataggggataacttatatttttgtaatatgtaacagatcatgacttgggtgttacgtttccttgtatattacggaacggcctaaagtcctggtttgataatattgtaaagtagatttaggaaaccgataccgtattggttaaggcttctatcttgtaaccctgccccccaacctatataaggagggcagggagccccctctaggggcatgagacaacctgatcgtcagatcaatacatactcggcggattcaaatccccaaacaggagtagggtattacctctcattgagagggcctgaacctgtctaaatcatttgtctctgcatccatccacttttaggtctcgtgcgctacccccttttattattgccgaattcatgtttcgacaccaggggatccttgacgccgccgctgcccgagagcagcgagcaacggagactgaagcggcgtcccggcggcgcgaggaggcccttgaggcccgtgccatggcgctggaagaacacgccggcgccgtggagaggggcttggcggaccgcgaggccgccgccgctatccgggaggcgacgctggcggcgcacgaggccgcctgcgccgaagaggagtccgcgctccgcctccgcgaggacgcgctcgctgagcgggagcgagctctcggggagtccgaggccgcggcacaacggctggcggacagcctgtccctccgcgaggcagcgcaggaggagtaggcgcgccgcaatctggaatgcgtccgcgccgagagagccgcgctagagcagcgggctgctaacctcgaggcgcgggaaaaggagctggacgcgagggcgcgcagcggcggggcggctacgggcgaaagcgacttagccgcccgcctcgcagctgccgaacacaccgtcgccgacatgcagcgcgcgctagactcatccgccggggaagccgaggcccttcgcctggcgggcgagatagggcccggcacgctttgggacgcagtctcccgtctggatcgcgccggacggcaggtgggcctctggaaaggctagacgacaacgcactccaccaatctggaaggcctcgctccgcacctcacgaagatggcctgggctctccaacaactccccgaggagctcgagaagaccatcaagtcatcctcgagggacctcgcccaaggagcagtggaactcgtattagcgagttaccaggccagggaccccaacttctccccatggatggcgctggatgagttccctgccgggaccgaagacgacgcgcgcgcgcgggttcgggatgccgccgaacatatcgtcaacagcttcgagggctcggcccctcggctcgcgtttgcccccaactccgacgaggagggcgacgccagtggcgcggacgatgctgacgacgaggccggcgacccgggcgcatcggattgagcccccaggccccctccgatctccagtttttctttttctttcttctaagcccttcaggcctcttttttgtatagatcaacttaatctgcaatcaaaaatgatgaaaaattctttgcgttaattttactttgctatgcatatgagatgaggatgatttgtgccgtggcccttttgcgtcttagcttgatttaagggctcgtgctcaagtcccagtcctcaaatggctcgggtcggggctagtgcctggggagatccacatgtcgagactggccaggccgggaacgtggtgaccgagggttatgggtgacccgattgtgggtttttgccgattccccctcggagttcaccacgccccggggcacggctcggttctgggccccgtttggcgattttagctgaccgaaccgagcccccgagggcaaggttgaacacgagtgaccttatttcaagtcaagattctccaaaaggaaaaaacggcacaaaaacagcctttaggaaattgaaactgcttttattgaaaaggtgaaataagagaagtgagaatgtgcatgtgtggtagcccccggccaaccctgcacacccgaggggggtgcggggttggcccgagcccaaaacctgacacccgaccccccccccctcaggggtagaagcgacgaaggtgctcgatgttccacgggttaggcaactcagtgccgtcgcccgtggccagccgtatggagcccggccgggggacgccgatcactcgatacggaccctcccacattggtgagagcttgctcaatccagcacgcgtttggacgcggcgtaggacgaggtcgccgacgcagagtgatcgggcccggacgtggcgctgatggtagcgccgcaggctctgctggtagcgcgcggctcggagggccgcgcgccgccttcgctcttctaagtagtcgaggtcatctctgcgaagctgatcttgatcagcctcgcagtacatggtggcccgaggagacctcagggtgagctcggatgggagaaccgcttctgcgccgtagacgaggaagaaaggcgtttccccggttgctcggcttggtgtggttcggttcgcccagagcaccgctggcaactcctcgatccatgaatcgccgtgcttcttgagaatattgaaggtcttggttttaaggcctttgaggatttctgcattggcgcgctccacttggccattgcttctggggtgggcaggtgaggcgaagcagagcttgatgcccatgtcttcgcagtagtcgccgaagagttcactagtgaattgggtgccattatccgtaataatacggttaggcactccaaaacgggccgtgatgcccttaatgaacttaagtgcggagtgcttatcgatcttgacaaccggataagcctcgggccacttagtgaacttgtcgatcgcgacatacagatactcaaacccgcccggggcccgcctaaacggtcccaggatatcaagcccccagacagcaaatggccatgaaagtggtatgatctgcagggcctgggccggctgatggatttgcttggcgtggaactggcacgctttgcatcgccggaccaggtcgactgcatcattgagagctgtcggccaatagaatccttgacgaaaggccttgccaaccagggtgcgcgaggcggaatgggctccgcactcgccttcatggatatcggcaagaagctcaacaccttgttcctgaggaatgcacttcaggaggattccgttagccgcgcgccgatagagggtcccttctaccagcacgtagcgtttggagatgcgttggacgcgttcactcccttcgcggtcctcaggtagagtcttatctgtgaggtatgtttggacctcagagatccaagcaatcaatctaagggatcttggagcgctcccttcaggtcccgaggcctggactccgacgggcctcgggggccggtcaggcgcatccgtctcccctaaggggtcgggtcgcgctgacggctgggtaagcctttcttcaaaggcgcccggtggggtctgggctcgcgaggacgcgagccgtgagagttcatcggctatcatgttatcccgtctgggcacatgccgaagctctatcccgtcaaaatggcgctccatacgccgcacttggcgtacgtaagcgtccatctgcgggtcagagcaccgatactccttacagacctggttaacgaccagctgggagtcgcctaacaccaggaggcggcggatccccagtccggctgccactctgagtccggcaaggagtccctcgtactctgccatattattggtcgctcgaaagtcgaggcggaccaggtatctaaggacgtctccggtcggggaggtcaacgtgacccccgcaccggcgccctggagagacagagaaccgtcgaactgcatcacccagtgggcggtgtgaggcagctgcgaaaggtccgtgctggcctcggggattgagacggtctctggagccggggtccactctgccacaaaatcggcgagggcctggctcttgatagcgtggcgtggttcaaagtgcagatcgaactcagaaagctcgattgcccattttaccacccgtcctgtaccctctcgattatgcaagatttgaccgagggggtaagacgtaaccactgtgacccgatgcgcctggaaataatggcgcagtttcctcgaggccatcagaatagcgtaaagcaacttctgggcctgaggatatcgggtcttggcgtcccggagggcctcgctaacaaagtagacaggccgctgcacctttcggcggggccgatcctcttcgctaggggccgtgtccccgaggcgttcttcgtccaagtggcctctcggggcgcactcgtctactgtgccgatggcctcggggtcggaggatgacaggggcggccttccctcagtggcctcggggccgtcctgggggtcgggggtccctggcgtcgtcggacaagcgggcaaagggccaactccggtcgtcaggggccttaggccaccgttcggctcgggggcctcttctccctgctctctcccgggtcgagtccgcacagggttagcctcggggtcaaagggcgttaggtgcggccttcccgcagtggcctcggggccttcctgagggtcgggggcacccagcaccgtctgacaagcgggcagagggccgactccggtcgtcaggggccttaggccaccgttcggctcgggggcctctcctccctgcttgctcccgggccaaatcagcacagggtgggggcgcgcggaatgaggattgtcctcatcgcgctccacaaccaacgctgcgctaactacttggggggtcgccgctaagtagagcagtaggggctcatttggctccggggcgactagaaccgggggagagctgagatatgccttcaactgagtgagggcacgttcagcttcctccgtccaagtaaacggccccgagcgcttgaggagcttaaataagggtagcgccttctctcccagccttgatatgaaacgacttagggcggccatgcaaccggtgacgcactgcacatccctaagtttgctgggggggcgcatccgctctatagctcgtatcttctcggggttggcctcgatgcctcgggcagagaccaagaacccgagaagcttgcccgcaggtacaccaaacacgcacttatcggggttcagttttatgcgggcggagcggaggctctcaaaagtttccgctagatctgagagtaaagtttcttggttgcgcgtttttacaaccaagtcatcgacataagcctcaacattacgtcctatttggctacccaaagaaattcgagtagtacgttgaaaagtaggacctgcattctttaacccgaaaggcattgatgtataacaataggttcctacgggggtaatgaacgcagttttttcctcatcctccctagccatgcgaatctgttggtaaccagagtatgcatctagaaaacacaaaaggtcgcaccccgcggtggagtcgacaatctgatctatgcgaggcagggggtaagggtccttaggacatgccttgttaaggtcggtgtagtcgatgcacatccgaagtttgccgttcgccttgggaacgaccaccgggttcgccagccactccggatggatgacctcacggatgaatccggcctccagaagtctcgccacctcctcgcggatgaaggcttgacgttccggggcctgccgccgcactttctgccggaccggccttgcgcccggccgcacagcgagacggtgctcaatcacctccctggggaccccgggcatatccgccggtctccatgcgaagacgtcagcgtttgcccgcaggaaggagacgagcgcgtcttcctatttgccatccagaagaccaccgatccgtgtggtcttggatgggccgtcgcccagggcaatctccttgaccgggacctcgtcgcatgtggcaatccgctgcctcggggcggtgggggcggaggtgccaagcctctcgtcaccaccctcgggcttggacgcagcagcgaggtggtccgcgcgctgctcaaagcaagcgagcgcgactttgaggtcgccatggatagagatggggccaccggggcccggcatcttcatctggaggtaggcgtagtgaaccgccgccatgaacttcaccaacgcgggcctacccagaaccgcgttgtacggcagactgaggtccgccacatcgaagttcacccgctccgtgcggaagttggctgatccaccaaaggtgaccggtaggtcgatgtgacctagcggccatgtgtgccccggcgtcacaccgataatcggttgggacggccggagcaccatccccggggccttgatggcatcaaaggccgcgggggaaaggatgttgagggccgctcctccatctatgaggacacgccccaacttcacgttgcaaatggtgggggaaaccaccatcgcaatctgccctccccgggcaacgcacggtgggtggtcggtctggtcaaaggtgagggaaacctccgaccaccgcgcccgacgcgtcgcctcatgagtaggggccgcggccagaagctctcgcttcatagccttgaagctccggcgagagacgtgagcacacgctcccccatcgacagtggcaatggtggccccaggttcttggaaacctaggtcatcatcgccgtcatcgatgtcaacagcgggggccttctgcctagcctcacttcgccgtttaccggagggaattgccggggacttgtcctcacggcgttcctgcctcctctcctcctcccacttcctcgtccgctcagccaagcttttgactgcgcgacagtccgcgagatcatggagggaggtgttgtggacggagcaccacttgccggccgggcgctccctgctgggagcaccagcctccttctttttgtcgctcgcaggcctcccctttcgggtggcccgcggagcgccctcaacggcgaggacatgaccctcgtcgccggaatggaccgacctcttcttcctcctcctgtcacgccgccctgtctgagcggcggatccgggggcggccgaagctgccacgccggaaccggaggggttccaagtccaggcctcctccttacgagccactcggtccgcaagctaaaaaagctccgcggtagtctggggctctttggaggcgatcttttcgagcatgcggttgtgccgcacaccccccctgaacgcataaatcactgcgtgtgcagggatgcaaggtatggtattgcggacttggcagaaccgctgaatgtacgagcgaagggactcatcatcccctcgctgtactgcgtgcaagtccgcttcttcacctgggcgtggataagtgccttgaaagttcacggtgaactgttggcacaaatcctcccaggagtggaccgacgcgggtggcaggttcatcagccaaccccgcgcctgccccttcagggccatgggaaagaaattcgccatgaccctgtcgtcacccccagcggcctcaatcccggtcgtatagacctggagaaactcagtggggttgacgctcccatcatacttctcggtgatggtgggccggaaccttgggggccaacggacattccgaagactcgccacaaaggctctacagccgacaccaccagccgggggcacggagggctggtcctcgcgtccatgtcgaggtgacactctggacgaagaggcgccctccgttgcatagggagtacaccgatcattacgccggcgctcgatgtcgaggcgggcatccggctctccacactgattctcccgagtcggaggcgccgatgagggagtggcagccgaatggcgtgcaacagccgccgctcgccgcgccctccgccttgacgacacggagccggtggtagcggcgccggtggccctgggggtggaggaccgtccaccagtacccaggcgctgctgtgccgtcatgaccaagttggccacgtcgtccagccatcgctgggctggagactccgggtcagggacgacgggcgggtgacgtaggagcgcgccagcagcctgaagtgcgccctggggcgtgctgccgtcgccgtagacgaggaggcgacgctccccatctcgccgttctcctccatcgcccgcgattggtgaagccgcggatctttcaaccctctcgagcgcctccccctgcttaggactttgatgtggaggaggcgggggagtacgagctcgacggcgtgggtttggctccccgtcgtcgccactcacactcggagagaggtcgggcgcctttgcttgctcggccattaggctgaacaagaaaagcttggcacactcggaagagtgcgagagctcagaagactcacgctgagtccccctatctggcgcgccagatgacggagctcgtggcccctcaccgggagaccgcgcaggcccccctttgccggttcggccgggggctcagggtgagatctcaggctctctctgtatgtggaaagatcgcggcctatccaaagagcaagagacacaggcgacgtatacaggttcgggccgctgggaagcgtaataccctactcctgtgttttggtggatctatgaatgaaggagttacaaagtgtgagccaaactctcccttcttctttgttcgtcaatctccagcccccccactctaaatgggcaaggtcctccttttatatctcaaggggataccacatgcacccctccctttccaaactggacttttcttctcttcataaatgaagcggagatttgcatggttgccctccgaacgtccttctgacgggacggcacatacctacctccacttctgccggaggcaggctcgttgtgagaacgaggctgtctgctgacgatatgagcagtgtcagaccggtcacaaatcggtcattcttgtccaccacgcgtcagctttgcaacatgtatttcgcccttcttcgtgtaacatcttgcctgtaatggttgggatgaagcctggtattcatctgaccagggctaacgtgccatctctaagaagtaacacgctagctccggctggagacgtgtgcctagaggctctcgtcttgacgggacggggcgaggcgtgcgtcagaccgccagtcgccacctaaccgttgatctgaccggtctgtgactggtcacagaccggataaaggaacgtgctgcactgcgctgcatgcagcgtgacgtgcctgtccagtccgcaataaatgcggttaggtgagccctgccgtgttcacctaacccatatatgtggcgcaaacttcattaggcgtcggggtgcctcggccgtcggggccggggcaggagtaacccgacccccctcggggaaatcaagaggagggcggacacctcaccctcgggcccgacgtccccgagggtgccgggccacgtgggcgattgtgtctgcctcaagcctctggtcacgatactcccggtcccatatcaccgacaaagataaactctagcaatgaatctagacacatgtgtgtccatattcattattatgattggattttttttgggacgaagtagtagagtaaaaggaatccaaacgaaactaatatcgaaataaaaacatgggctaagtgggtttaatgtgaaaatttagtagaaaaaatgcaaaaaaaaaaacattccataagtcgcttgaaagttgatattccactctttaagttgttttgttataaatgtcaatccacatactcggtttggttacaaaaactatcccaatgcacatgtgcttaaccgaatcaatatgttttcgtatatttgtgaaacatcaatgtgatctgtaccaaaactaaaaatacttctagaagtataattttgacacttattttttggagattccacaaatagagttgttgatgaaagcttaaatgttgtcgctctgagctttgctttatgcagaaaaaatttgatgaaacatgaagaataagtctaattaaacacctagacacgatagactcggctagcttagcatgtggagctctacaccagcgataacaagctgatttggttaagcacatgctggggtggtttttgtaataaaacataatagtggatgtgcatttacaataaaataactttatagggtgaaatgtcaaacttgaaggtacttccggtgtgtgtgttttttacaattttcccaactttagtagaaaaggaggtccaaactaaacaacactctatatataatttggcaagtactgattttaaattttggaagtgcaaataaaattcatttgttttgttcttcaatacatacaaaacaagtgttacatccatacaaatatatgtactctctccggacataaatatttaatgtatagaacaaggattttattgaagttttgatgcactgtaataaatttcctaaatacgtacgtgtagaaccatcacgcacccatgcataatccaaggggggaaattgaactgttaccatcacacaatgaaatataataataataaaagaaaaaataaagctaattgtgtaatcaaatatagagtacaatatatctaggtactcatatcaattactacctctatctcataataattatacgtatttctaggatttgaatttgtcacaaaatattttttttgactgggaatttgtcacaaaatagttgttacgatagagtactaatggtcttattaatcacttctcatttaaatttcttcatattttaccgtcgtgtgaacaatctcacacagagacacctcaagctcgcccagccatggtgaagaacagtaccacaacctcgtctaagtatagggacaattgcaaatttaccactactttgaatcgttattgcaaaactgccactagaaaattgtaaaaatgctactagaaccatcattcgagtggcatccttgtaatattgaaaaaaccggtggcaaatttacaaatgccccctaagtatatggaggaggcggtcgtgagatcatgttagaggcggtgcaacaacggagctcgtaaaggaggtaggaggtggcatactggcatctataagttctctgatctgtccccagtgtgcagtgcctggcaacttgaagatcgagatggaggggaagagaaaaaagagaggtacgtggatgatgacagctaagctggcgtgggtccaaatgttgttttattacggaatttacacgtagacaaaaaccattttgacgtaaccataaattaaacggtttcatatgtcgatagatatcaaataccacgttttgaattagagggagctcaaatggacttatcccacttacaagtggactttaagggtgatgacttcctccttcatctttacctatttaaaaaattatagatgactctatacttaattcgttttgtctttcgtccgtggcgtataagaaaagacgtatgtccctattcgatcgctttgtccgctcatgtccaacaccgtctttatcgcaaagtgtgatagaacatcctcgtcgaagctgatctggatcaagcggccgtgtccatgttgctcggtggtggactggtggtgagcaactactttctccgtttctcacgaataacttacactgtgaaacggaggaagtactagatttcttttgtatgtatgacaatgttatttcagccttctgcagtgatggtttccttagttgcaaagaaaattttttggttttatagttaggctggatatctgttctttggagtggatgtaattagttactgagttttgttgaaccaggcaataataataaaaacggttccatgcatcgggctgtatgttttcaccaagtgacgaacgaaagcaggtgagtacacaatcatcttgaattttttaataggaaaagataaaacatatcttaaagtacaattaaatttgatatataactcttttttgtttctctactattataaaaattaaagatgtttttaccggtactttggtacgtcatccgtgtatgagtcggtttttaagttcgtttgtttttgaaaatacatattcgtatttgagttaattttttatttttaagttcgttcgcttttggaaatacaggagttgtataatgattttttttagaaaaactcgcatgctaatttgagacgatcggattcctaattgtagctcataattttctaaaaacataatatatatccaagcgaattctcacagaactaaactgtataacaataataataagattaaaataacattcacccgttgcaatgcacgggcattttgttctatataaacaaaattatattattcattgcaattaaaataccaatatataccattatattattcattgtttttatccgttgcaacgcacatgcatttttgttagttaaagaaaaactatgaaattcatacacgaccaatccatctagaaactatacaatgccacatacactacaatcaaataaattccattatctaaaataaacatacactacaatccaataaacacatttattgtttgcctcctggtgcagcgagagaatctgtagtttagagcaaattatggctgtgttatatttactatggtacctcacagtaccacctagataccatgaggtactaaattttatactaaaattttagtatctcatggtacctcctaaaagactgtaaaattactctatttactaacatgagtcaagcaaagttgaccatgttgcctttatggccatctcaatgccatccaagttgtcggccatttgtgtactcgtcccatccttctgcggtgtaagactcctgctctcacacaaaaattcttcaagatcaaaacgtacacagcccggaaaataatcactaataacaccatcaggagtgtgacgggcatcatctagttggtcttggtacgcgtaaacgtaaatgtgcatgtacccatcatggttcacagggagtgtgaacggtggtagcttgccaacactcaacttgccattgaaggttatgaaggaaccctgaaacatattgtaggtggcagctattgtaagcgaattatattggtggttctcttcaatatggtacacctcaaactccaaacgaaccaataccgctctggggatagcaaccattcttagatcaagagtgctgaagtgaccagtgtcgatgtgccaatggagcctttcaagttctccatagaaagatggagcgtagatagagtagccatcgattaatacttcatcttctccctctatttggcccttaataattaaggaatactcaataagtacaagtccaactgcataaatgcctcgtgaaggggttatgagaggttgcagcttatgagcaccctgcatataatatatttttggatagaaaaaaaagatcaattagaatgttcttcagaaaaaataagttatatgcaacagtacgtatattcttagatggaagcaagggaaaaaaatgtagaacatcaattactcacagggttaagtttgcatgggttttctcttgagtattcaaagatacagttgcgtagctggctgttgcgtacatctctaaatgcgaacgtaccatagatctccattgaatcattagaaggagaagataaatctaaactgaacacttggatagcccgacagcatggttccttcccatccccattcacccagcggctttcccacttcggcagttgaggaactgcaagaaaagagaaaaatatcaccatgtatcagtacgtacatattcacaatccgtaaaatgccaatgtgactaagaaaatatatatagttggtgtcagctggattaatttgtagcatgcagacgcacagagatgctccacagatactcgatttggatccacttggaattgcccctcaacctgaagtgacccctcccaaacaaacgagaaatcgcatgtagcgtttgctttgggcactggaaactccatctttcctaggatttcattctcccatttctcctccctatcagcagcgtaataagggttcccatcttcgtagtaaaattcatgcccgtatccaaaaaagctatgcccttcatccgcatctgcatattctacatcagagtcatattcatatagatcacttgctccacatatatcactaagttcatctgaatcgctatcttgaaggttaagttcttcgtcttgctcctcgctttcccttagcagtaagtctaactcattgtcccacagctaggtattgagcacctcacgatcaaccttgtctctcagagaagccaaatccatgtcgaactccacacccttcctcggtgtttcagagtcgatgtctggagactctgttatacgaattcagacccaatataaatattagtattggcaataagtacgagaaaaatgaatttttgaacacctcaaattatgaaaaattctacaagtttgacaacacaaaatactacacaaacatataggactaaatttaattctcatataaaaaaatactccataagccacattaatatattatttgccactctacaggggactcggtacccttatttgacattgaaatgctaggtaggaaataaaaatttctataattgtacttttcatgaatggggattgaaatataacccaacatacttatatcgtcgaatctattaatatttattatttgtataacacgcataatatatgaaattatactttccccaatgcaagatatacacacacacacacactcactccaaggtccaaactctaaaaggataagaaacaaagggttagaagaaataatacaaatagcaaatcccaaaaattgaaacaacccttaaccttttcgacgcccctccataatctctcgaggctcctccacctacgccgatcggcggatggactcggagatgattttcaggtcgatcgacaaagaggatcggccacccaggcgttagtagactcgatgtcgtagccgtaaatttaaccgcagccgccgagcaagccggtgcctggacttgtatacgagatattcagatatatatataagctgcgcgtgtgccggcgtatcgtcgtcgtctcgaaaccgagggtaagtaggattagcagcctggacggacagctcgatcgaaacctagggataataggaaacgaacttgttctctctcacgtacgaactcgtgcccccaatttttgtggaaacaaatttggtagatacgggttgtaatcccgtgcagcctgccgcagatcgtcgcggagtggccgcagtatcggttggatctggatggtactcccgctcggctccaagcctccaggcgcgcgacgccgagtctgtaagcgcgcggcactcgatcgggctcggctcgcgtcgaaccagaaagcgtcgagcggatgacatcgacgggcgcaacaccatcagggattcagggccacgtgcatttttcatgccatcaaaaattcttgtatacaggcccaaatagatgatagacttgggctctggaattatattgtttatgcatattcaagccccaacggaaaaaggaaaaagaaaatgaagcggagcttacagtacacacatgaaaattccttcagccgggcattgatagcatacatgatacatcatgaataaaccatcactatcagaacgtcgaaaaccaccatgcataaaccatgcatgcgagagtaacatcctggccattagtagcatatgcatgggaagacatcatactacagtaacatcacacatgcattcatacatgaatgccatctatagtttgtcaatatcagaagacatactgctaccggagcccagcaacatcagaagacatcatagtaccatcacacatgcatacatgaatagcacattctattagatttagagcaccatcaaacgtccaaaacagtgtctcgtagtgttctgattatcttcctttctgctacatgtgccaaacgtgtcgtgggttggagaagtctgatgtttttcgccgggccagcgatagaagccggggtgagtttattaaggttgggaaaacaattgcaatactgcagggttaacatggttgctggatggcaatcttggcgctaagccagattactgaagaagagctaaggtggcgccacggccagcagatatacacacggtaatgaccagttatatttagtccagctccggccaggccggcagctcgttttttccaaaccatcaggtgatcaaacaaactgccaaagtcccattgtgttccagcgaaagaatggtgtttttctcctttgtgaattcaccttcatgtggaagaatttagtgttggcgtcatcatgcttgatgtgggtcagccgagaatgctgacgcatccgtatcctttccaacgatgctagggctgatgtagaaagttaatttctgctacatagctcatagctatgtgttcaaaagattgcaaagataatgtgaacgtacttgtgtcaacctgaacattgctacctctactcaattcccagatctgcagaagggtggcactgtgtaagagttctgctcatattgtaaaatgcaaaagggaaagggagtaacattttgatctaaccttttaagctgaccccctcctcagccttgttgcacaagacgagcaacggatctgttgaaggaaaaatactcattgccttccttttcttctcagcaactagattttcaaataacttcttgtgctttgctttcaattcttcatgtttatgataaagcttgattagaaaacaataattagttagtataatttagccaatactagcatattaaaggtaaattcgtagttaccttatcattttttttggcatgcttttcctttctcattacgttgtatagcttcattttgaatttgggaggattgtgtactcaacgacaataatccatcaacggataatagcaccttaacctcctttttgccctctcttggatccaactttaagtgtgaggtatgcaaaaacatcacaagctttagttaaaataggaagttccccttcaacaatctgaactgctgtggacaaagagctcgcttggagtgcaatctgggctgcacatggtatatttgaatgatgttccaacacgcgatttattccacccattactacaactccaacagaagcgtgcaaacaacctgataaagcaacaagttcacgatccttaacagcaagtttacttccaggaaatgcatcccccttgataaactcaatgtgttttattgccaaatttggatctgttgtccagcaatcgtctgcatagaattccttgcttttgacaagagcttgctcctggaaatcccatacttttgctgcgatatgaagagatcttaagatcaatctggatgcacttgcccagccattgatatgagttgcccccacatagcccaatggttggagctgtgcaccaacccttgaattcaaagatttcaaaataagacgagatatgtagctgtttttcaaactttctgctgagaaaatgatcagggctgccattgctctcttgtgttttgctgagtaattgtatcggtcaaaatgtgccaaatcctggaccatgtttttcattacgctatatcccacctgaaaacgtgacaattcatttggttctttgcctacaaggtcaccatagttgctgttgtgttgtagaagtattgagcctttaatatacttctttggccttggtggcgcattttccttcaccacatgttccttgcttgaacttgctaattcatacttgtctctttgcttgtttttcttatccatcttctcacgcttctggtcctctataataccctcctcccttgttttacctttctcatttatagaaccctccagcatctgcatctcctccttatcgtcaaattcatagatttggccatcagcagtcctaaatcctctcatccacatgttttttccttccactatggcagttacagttgaagcaccatcagtaaaggctacagcaaagacttcaatcccttctggggtaatacagaattcctttctcttggaaccagtacccttcacaatccttctgaacctgcgcttaagttctttgcgggctttatcaattttttgggtagatgatctcaggatagcactgaagtcattagcatgagttaacttcaggtctaaagtaaatagcagttcggatggcatgtcatacactccaaatgactgttcatcacccattctgaattagaaacgagctgatagacaagttgtgttggatatatcactgcaatcaaaatatcgacaacattattaaacacacagatgtaatcaacttagcttttttatacacagaaaaataaatccaccaacaaattaaataattactcaactacaatgtaacatctcaacaatgatatagcctaatccctccagtaatttttcccttccttttattttttctggttcttttggcttttgctgaccaacatataaaagtaatacaatgattcgcaatccatttgcgtattccaaatccctaggcagccaaatcgcacacattatattcttgaaatattatactgactcagaattcatgtacatgcttagtaagcaacaaactgcagataaagcaatagtgacacatactcttgaatcaaactaaatatgtacaaacacataccttcagatgcttggagaggatagagggggtgatgtgcctgtacaatgtacttgagctttccgttggtgtctggtcaaaacactgcactgttcagcttctccttgtactgctgcttcatctcaaacaatttaaacttggaatagtggaatagataatgaaggtgcatgtgtgatatgcacccatatatcaataaatatgtacaaacatcttgtgattacttcgtttttaaagaaacacacagtactgccactgtaccgacatttcctcgcatttaagagatgtctgaaacatctactaacaaaaaaaaattctggacaaatatgaagaaactgtgaggtgtgagagaaaagaaaagaaagaactggctagtatagtagtattaattgcagtaccgtcgataacaacagatctttttttttaaaaaaaaacctaaggcggaactttgttccacttttatatttagaagaagagaattgacctagtttataagaaaaaccgggcccaaaaaccatacaataacaacatatcctagttttcaagaaatgtacaattctgctatatgcttataagtctaattaatgaagtttagagccagcaacagcaaaggggaaaaaataacaattagcgtgtaacttagaaataacattaggatctccatcaagaaaagcaatagaaatcttcacaagaaccgacaatctttatcaaaaaaacaagcggattgtttacccctgattatgtaccccgtttcacatcgcaagaggtcaataactttcgtttcgcttcttctataaccagtgccctagaaatggagcgtactggaatttttttgacgcaagggtgcctaaataatcaacagcaaaaccggacggaaagattccagtacgcacgaatcgagtttatagcaagcagcaacatatcaaggcaaacgcgtacctagggttttccgccgtgatgcgtcccctgctgccaagacaaacgcgaccgctgtttgattcgtcccgccgacgcggaggcggagggctgggggcgggcgcagtaggggagagggcggcggcggcagaggcacgcgacgcggatacggcttgacgccgcagaagctcgccgatcgccggattctgaaggtgccctaggtggggaatgcaggtaggcttgaggttgagaacggaggccgacgccgccggcgatcggcggccaaaaaccccacccgcctttcaactctaggagagtccgctcgcaggcaggagggtcccactcctcagcacgcaacaacgtgcgggaccaattatttgttgacacgtcaatgtttaacttaacgtctagtactaattaaaggtttacttctaacccccgtgattagtccatttctagcatcagtacctcacggtttaacttgatttaatcaaatattttgtctcaaagcaaattaccaattttctaaaatatattcttcagctatgtcacgtttttcgatgtccactaataaattatgcaaaaaaaactttgattatactattgcaaaatctcttactattttacttaaaaaaagaaatgtttccttcatccgtcaaaacaaaataaatagccaaaaaaaaaagtccgactccctctcagaaacgaaaaaaaaaagtccgactctaaatccgattctccccttaaaaacagaaaataaaacacaccactcctctcggtctcagtttgagtccgagatcccaggcacagtcctctcggtttcaatctataccgtgatatcccatacatcttggtgaaaaaaaattgatgtgccggattgaaaatatgtttgcaaaaacggaacctaccggaggagagcattccatttttatatgattttaatttttgggtttgtacttttctatttgagtccctgtaatttttatatttacacttgagtccctataatcttgcaataagatacttgagatcgtttttttaagaaaaaataataaaagggagagaacaatgacagacaggtgcataaaaagaaaaagaaaaagaaaaagaaaaactgcaaaaaagagaaacaacaacaataaaattttgtttcccctaagtggcgaaaaaaaccgtagatccgattcctataaaaggcaaaaaaaaaagtggtgaaaaataaaggctagatccgattactttaaaaacggaaaaatgaagtctgattcctataaaggtgagaaaatctgaaaaaacatctaaaaaatttcgtccaattccctaagaaagtggcgaaaaaaagggttcgtaaaaaataaaaagctagttcatacaaaataaaaaatacgcgcgagaaaaaaatagaaagggcaaaacaaattccgatttctaatcagtatatatctcttctctatctctaatctaatctaactatttaaaaagagaaaatacacgagaaaaataaaaacagttcaaaaaaatgcgtgagaaaaaagtcagaaaaagcgcaaaaaaatgctaaaaaggttttccatcttccataaaaaaacgtgcgagaaatattatttccatcgtcggtaatttttttaaaaaaaacatacgaggaaaaaactgtaagaaaaaatgcgccatttctaaaaaatgatttgaaaaaacacgcaagaaaaaaacaccgtctattaaaaaaacaaatcgctccgaaaaacctgtcagaaaaaaaaaacgctaaattgatggacgcttgagtcggataggatccatcgattttttgccatctactacacggcttttatttcgtcatatattcttctgtattggaaaaaagcaaaaaaatgaacattaaaaaaaaggaagcaaaaaacgcgcgagaaaataattgtcaagaaaaaccggcaaaaaacacacgagaaaagaaaagcaaaaaagggagaaacatatggttttcgtcgtcggtaaaaaaaattaaaaaagaaaacatgctaggaagaaactgttagaaagaaatacactatttctgaaaaatggtttgagaaaatcgcacaagaaaaaaaatacaccgtttataaaaaaacaagccgctcattaaaatataaacattatcattgacatgattatgcatgaaaaatgtatattatcattagaatttatttacccgttgtaacgcacgggtatttttgctagtttatcaaaagtttaaaatgctactacaagcttccaatcagctagaaatacatactccctctgtctcacaatgaagcacctcctaacattccaatgtaaaattaaaggaggataaaagaccaaaataccctttattgataataaattagtattggtgggtaggtggcaaggggtattaagaaataaaatttttcgatttgcgaaccgagagtagataagaaaatagaagttgatttattttgggacaaagtttgaattacagaagttgatttattttgagacgaagcgagtacacatttgtttctggcgtaaaatgacataaacagtgtacaaaaaaaggggagaaattcatcagttgtaacttgcaaagacatatcatcgttgacaggcaggaacaaaatccagcacagcttctcccacgagctcctcccagactccaccctcaatttgctcggtaatgtcaaccaactgcgtcctcatcgttttcacccagcctgttccttcaacctcctgcttcacaactctctctatcatgatcccagcattatctctcctgctcaccacgaacatccgtgccccgtaaatccaatctttcaggatgctccagacttctatccccaatgcaggagaggaggcgtccatccatgttcttgagtgtgctttgctccatgggaatgtacttagcaaggtgttctcgccgatctcaacaagagcaacattgacacaatcgaaaagaagcctttggtatgaactttgctcccgaagctccaagactttgttgaacagaatcggatcaagaggacagtcaggtaaatgccagccagtgaaaagcatactcgactgcgcatcgtctaatccagcagacgacattatattttgcacaagaacatggcattccgattcatcgtcatctacatcagggagaaaagaagactgccctcgggtgccaggtaatgctgattctgaagtggtgtcgtcccatgataaggaacaagcaacagcctcaattgctgaagatcttgagacagcttctgaagaaagttaagcagaaatgtcagtatataaactaaccaatctgagacttgaagaactctaggctggaaactagacttactagcattttttgatgtagtgcttgcagatgattcaggttcattacaactgctatcttcagagggtgcatcaagaactgacgtagggctgggttggtcgcgtgtactatttaggacctcattcagtcctagtttattcaggtttccacttcgacaatccaatgatgcaggtacatcagttaaagcagttgttccctgtaataaaatttctcatcaaattctctgtggccgaacaaatgcattgaacaaatatttcttacaaatggaagaaaggatgtcatagctcaagaataaatgtgcccatatcaattacccagctatatgaaaagaacataagatttggcttgcaagatagatgagatgaagtgcctacctctgaagtgctggttgattgcacagcacaaatatcaagtatgtcctcacaaatggtggatttttcattaccatccaaatcatggttggcatcttgttgactatcaccgccacagtcttcagtattccctgaagacaaatcagatgtatgattggcagatatctgccttgttgttcttttacttcttggaaagaagaaatctgaaactctacccctgaaaaatgatttttctttatttgatgcgacaatatgttttgttctttcatggccctgatgatttgaagttttcacatttgccaccatgttattaagcgtggatggaatcagaggaacagatgttgatcttggcaaccccataggtctctcaccatttttttcatctttcctacaagcagttgcatatttagcttgagtaggtagttcattttctctgtcataacagcgactggtagaaacagaaggtaactcattgatgaaattatcattcttcacatcctgaagggagagcatctctcctaaggtgcatgtgctccttggcaattctacttgctcttgactgatctcatcacaagttacagttgcccatcgctctgaaagccgttgcttggcttccttagtaactgatgactcagcaaagtgggagatcttgctaaaagacgatcccagatagggatttccatgttttttggtataatgccatgttcgctttgacacaggactacatccccctgagtcactgaagctgtcaccttcatcttcaatatagtcaatatcagaatcactgttctgatcaatttctgaatcacctaatgaactttcatctcctccatatccatttgagtatgaggaagataaaaaagattcatctccttgatgacagccatcttgctggttatgaatgataccaggctctacttttgtagatcgtagggttgccccattgccatccaatgctaccctgaaatcactggggttaattgatagaaatggagttgtcctgggggttagctttgcatttgttaaactcggcttccctggagtaggcctcaggagtactattctacttggcaaggagggattttcttccttaaaattagaactctgatggaactctctcattgctgctccattttgctcttgaatttgctcagttccagtttgtcttgtgccatcactctcaaaagaaccaagtggctttagtaccgtaatccgttttttctgaggtggtgctagattggtgtgagaccctaccaactgtcttgagaaaattgagttaggttcttcaagaaatttcagaaacaaatctttgtttgaacttacaaccctaagagcttcttgtaagtcctttgaatgaagcggcttctctgccatgcctaagcattttttctccatgacacttcctcgcaaaatatccactctgttacttgtgttcccagaagaccctcctttctgcgaaattttgtcctgaaaatagctcatccgtgtttgtgcttcagatacttcatacacatcattatattgaactgcttcctgacaaaatgggtggatatcttgtgtcgttgactttatgagacgatgctgctcttgttgctttaagtctttgtttagtgcttttaactggttacatgattgacttttcctgaaaccacttttggcctggtgtaaaactggtccattagcaggtagatcctcctcaaggcccattaatcgggcaacgacacctggtggctttctctttaattccacttctttagtcatctcttttgctaataacacttttaatgaagttgcatttgattttctacgtgaagaaccatcacaaggtgcctgcagagaaacccatattaataataaaaaaaagacaagaatcatcacaggaatgaaaaaaaatactagctggatcagcatagtttaatggcataagcatattgcactacatatagttttacacttcattttcatgtgccttttattctcaaaattatttctaccacatttcatatcaaaataaaattgtcacataggagtagaggagcctaagttaaccacacagaagaaaggtatgccacaggatgctcacaggttttctgtccgcatgaaatttgtcagagtcagtggctttctccaaatatgaatagatctgttggacaggacaacctgaaaggattaaaatttaaaattatgtatgttctgcaaatagcacaaaccttagagatatacccgaaaaaactaaagatccacaaaagcaaaatgaagcgagaaataaaaaggaatagcaaaactgccaaaacatctcattatcttggaagagcgtaagaataatacaatgttgtgtaatccccccccccccccccccccaaatagagaaaaatggcctttgatagagcaatactgcaaagtattggcccaatggccctagctaatatttccagatgcatagcatatccaatttcccacacataacatagaactaactagatgtagaacacattcaagaagtgccaaatttctgtttcaaaaaagagaaaatgaagaagaataagtactgaagggcataataatttgatataatggcaagaaatattgaaatttatggaaaaccctcaaatccctctaataaaatacccacataaatatacataccatctccttgagtttgacccatagctggctttgctccagacatccctcaacaaattgattgccttctggcaataggtagctgcaactcaatcttctggagtatggaatcctgaaaatagtgacatcccatgaaccatgtgtgattttaattttccacaaactaaagccaagtgacctaacttaattacaggaaccatttcagatactagtgggtagtggctggcattgatgagcacggtgaatatatctgaaaagctctcagaatttaaagcacttagggtttgtacttaggggacatgattctgagatattgctgtagcaagatgccctctttccacaaaatttcaagagacacatgcttaaaagctggaattctgcaggcacttgtaaggcagattggtgaaagaggtagcacagttcatggtctgttcttgtataaaatcacaagaaatgagaaatggcgagcagaacgataagattcgacggggacatggcagcacttggcaacatagaaaagaataaggcgggagaaaaaaggacaggataaaagcatatgagcagaaacaattacaaaaaaatatggacccatggcactaacaagatcgtacatacttccaaaaggaatcttgcagcaaaaacataatctctgaaagactgtattttctgtcagaaataaaaatcagttatgagaggtaggaaggcgtattttaccatgtctttagatcagacaaatgtgaaaacacgaaacagaacagaaaccgagcaagtacaaaatacccaggatttctactctacgtacaggcgacagaggaatctctgtagacatcgttccaaaggcttcagaatttatcaggaaaattcgtcagaatttcgaatcttgacagtggaagagaattagggggagggggggaggaaaaaaagactgtaaaaagtaaaggaggagatgtactccacgtagaatagaaaacaacaatgggtgaaactaccgagatgtttaggtttatacatgtccaaatgagcactgcaaccgagacaattcctcaggtctgtagtctttcgcaggttaaaaaacaccaaaatctaagcttggcttgctgagtgtaactagattccactgttacaaaaagaagtgcacaacactgaagtaattacaaaaaccagaacacgacattacaaccagagggtacaggaaagcatccaaagaatcttgcagataagagagacttcgaggtctggtgatctgcgctgtttttgttctattcctcactggaaatttacgaatttcatgaagagtttggaaatttgatcaaacaggtgtgatgtttatgccaaaccgacgaatgttcatcatgactagaccttgtataacagctggcattccattttatttatggtgcattttcttgactgacacaagttatccccaaatcgtatgtcggacacccctagaaaaattgcatttgccacttcccagatgacaatcaaatcaaatgtagcacacattgagtttccagtattgatatcacaaaccgaatacgggagaaaaaaaaaatgcacagcccaaacaatgcctaatcctgcataccaaagctccaccaaatgaaacagaatgctggcattttccatccagcacaacccaaatccaaccaggcacatcacatcacatcccatcccatgggaatcccggcacaagaaaggcccgaagttaagtgagcctgtgatccagagagagagagagaatcgctagtatgcacacctggggtgatgcggcagcggagcattcttggccgccgccggcggccggggaggggagggagcagcttggcttgcgcggcggaggcggcggcggcggtgggttttgggagggggtaagcaacggagcggaggagacagtgaagcagagtggagtagagtggagagtgtgggactagtgggatatgcggaaaaagcctttgcgagccgtttgtttgccgttcttttcttcgcgggggcggggcgttcgcttgtttgttgcttgtgcagctgtgcttctggcccgtggcgcgtcgtgggctgcgtacgtgcgcgcgcgcgccatggatcgccttaactaacaaaaaccagaagttggtggtcactgggattggatcgaaggatattctcgtgcgttcttactgggattggatcgaaggatattctcgtgcgttctttttccttcattttttgtgtgaagactttttattactccctccatctactttcgatctactttcgaatgtcatatttatcttgacacataaatcaaagataagtaattctatttatcatccatttaaacatgctactagttatttctcgtaaacaagcgattcattaatatttacatttctcgatgccatgtagccaatcttgtgtggaaaaatggagagtcacgcatcaaatccgaaaaagtcattaagagaataggttgttggattgaaatatgtctatcaaaaataaatttttcagatttggaaatatgcatatcaaaaatagattaagggagtagctgctatgtcattctctttttattaactgctatgtcattctttttgtgaaacattaactagactactactctctccgtcctataatataagggattttggtatgtattacactgtttgatcactcgtcttattcaaaaaatttgtgcaaatataaaaaaaatgaaaagttgtgcttaaagtattttggataataaagtaaatcaaaataaataaataataatcctaaaatttttttaaagaagatgaatagtcaaacagtgtaagcaaaatgttaaaatcccttgtattagagaacgaatggagtatgttcttaagtacatgtgtttccaaattaaggtgattttttttcttaaaagacatgatccattagtctcaataaatgtgtgatatagtaccagtgatgaaaccaacaacatttttatcaggactacgtagaaaagcctaagcaaccgtccactggatggagatgtcgctctataacgtatcgttatttttatttaaacacggtacatatgcttatatatacatgcgcactcccttctataaatattagtatctactcgtatattatatcgcttataaattttttgaaaatgtaccagtattttctaaaatttatgaagttatcacatacaactcactattgacaattatgttatctatcacaaacaaaagagataatcataaatataaatataaggaccatatcaaatgcaggactgaaattagcgccaatggaagagaaattacacaacacgacataattagtggcatgagagtaattgtaagaaactgtcggtgtataaaagttcggcgacggtgcatacgctagaaaggaaagcacagcattcgctcgagggagaaaaaaaaaagtaaagccaaggcgttcgtgcattagccttttctacaacaacagtatcaatataataaaaactttgtactacaagtgctatttacaaacagaactaatttgtccttactttaagcaaagggaataaacagacgagcaaaacgtaaccgcgcgccattcttcccacaagaagatcaaccagacaaccaccacacggccacaagcccacaagcccaccccaccccacgcctcggcggctcggcgctcacgagtcacacgacccgcgaacacctctgccacctatccgtttccatccagttaggcaccgtcccttaacatttgtcgctgcgcacgccgcgccacgccacggtccaacacacgacgccacctgctgcccgcgcaacagatgccccccgcccccggcccccctctccgcgcaggcgcggctaggcggctagctatagcggcgcatgccccgcgcgcgcgcacagtggatcaaacagtacgcgcacagtgcacgcagcgcccgtcatccacagccacaccgtccgcaccgcgcgccccgctcactcggccgctaaacccaaaaccctccccaccaaccgccaccgccacggctaccaccagcagcagtagcaggcgcggcagagcagaggaaggcatatccgcgcgcgcgaatgttgcctcccgctacgcgacgtcgcgccgggccggacgatgagacggagcagagcagcgcgagtgcgcgacgcgagccatgaccaacggcaggcgacgccgcttccactgtcgcggcatctgcgtgcatcagcgatgcccggccggctgcccgccggtcacatggctataagcatcgaatcgtagcgtagcctcttctctttttttttctttttctctgcgcgcggcagggcagggcagaggcaggcgctttcccggctggctggacccgtgcctttcgggaattaatgaggaggggtcaagatcaaatcgcgagtttttttaaaataccgctgcctacctgtaggctgcggaccgtgcaccagtgcatgtcagatacgtacgtacgtattcaggtccagccgagccagagccagccagccatatgcacagcgccacaggattttattccgaacaaattgtatgagaacatgtacatgacgcgtcagcccaagccagtgtcaggactcaggacgagctgggacgagtaggcgggcgcgaacatgaaaacggctgtttgttccgttgtgcagcaggcgacgtagagggagagggaataatcgtatgatcgtcgttgcgaaatcgtgcgatgcagcgggggagaagagaaggcggtttatgtgtacaacagtggcgcgtgttaggatagtggacaaacgatcaccaggggaaaaaaaaaaactagcacccgtgacacctgaagatgccggcgatcgatgctgatggtgatgggacgcgcggaaccgaagctagctagtccaccgctgccatgatgacgatgggggaggagaacattgatgtgcagcttgatggtgagctaccacaagttctatatagttcaatgttatggcagtaagatggaaacgtgttgtgtttttttcgtgtcatacactggtgcggttacttgtttaggttctcgattgaatgaatctaccaagcatgccaagcaggcaaggtacatccgtacgcatcaggaaataaaggccatttcctaatcactttgtcaatttttttggcataaacctttacataaaccaagtgaatgattattttttggcattgccaattgttttggcttgggtaagtttgggtctgtttggggaagcttttagattctgagaagcagctgtttggtagccagcttctgagaatctggaagagctctgaaacccagcttcttagtttatttttcagaatctgtaactacagattcttagaagctgtggactgtttggggtagcttctagtagaagcagctttttgggaaaagctatagttgggacaagctcccccaaacagggcctttggcacaaaccaaccaagtccaaaattccatgcaaagagcatgaaagtccaaagaatatgtttggtttgctatcagggtttacgattccgacgaaatccaatcggattaagcgaaatttcgacgttccgacgaggcttgaaagtagaaactgtttgagatttcgagaagttttatccaaattcaaatataaattgataaaaaagaaaaaatcaaataaaatcttataaatactatgatattcatagaacctattgggatataatttttttaaaaaaatgatgtattgtgtgtatttactgaaattttcatcatgaaaaaaaaagaatttcaggaaattacctctattacaaattactgatcaaaatttcgatgatttcggttagaatttcgccaaaaccaaccggtttttgagaacttgtcggcaacttagggaatttgtatttaaattttggtttatgaaatttgttcggaatttaccggttttccaccggatttcgcgaaatttcgaattccgccagtgcccgaaacggaagagcatgtaggaattgtaaaccctgtttgctatcttcttgggagcattcaattgaccatttttgacatttctaacaacatgttcatagtcataaaacaaaagcagcatgttcattggattttattatacatttataccacgtaccaactccaaaataagaacttcaatgcgccttcactgaggcaaggtgcacgcacggcagttattgcaagatcattctgtcatgagcatgtcaattattgcaacatcgttttgtcacgtagggaggccaccggagagataaaattaactagcattgggatcgaaggcaatcaattgctggacctgttttttttatggccaggagcaccattccatcgatctccctgcccaactcggcaactctacggcaattcgcagtacagttgcagggtcagggaagcatatgaggctacatgaatctacacattttttttcctctccgatttagcgtccagtttgggagtaaaaacgatatgagtagtggagcttctgcggtaaccgctacaggtcagttgattccatgggtgaaaactggaaaggtaaaaacttgtcccaccacgttgccagttgcatttcatgttgtcccactagttatgatcagtttcactataagtttactatatcggcaatatttctttcttggagctgagattgattcttgggttgttatctcactctatcctttgttatctttagtgctagttcaaaattccttctctccctttttttttcctgaatgaacgtaatagctcaagtaccaagcatcttgacaactccttgcatgtaaaaagcatctcaagaaactatcgattcaccaagaagcttgtgtgatatgaacgattgaacggtaccttggaggcgtttgtaccatactaatgtcagacgataactctggagtgctggtaaaaagttcagtctggtcgcccaaatacttccaaggaaagcaggaattgagctgtgcggccttgtgcagagaatatgtagccttttactgtggcccgatactgtttagcatagttcttgatcccgttggaatttcttgaaagaaaacatcacatgtcggggggtaaaaagcttcagtcaaaaaagcttggaaaattgacctcaggcaggcagagctcggggatttacctttgagcttttgacccttcggctgaagatttacaattcaatatttgtatcttacaaccattgctagcaacaagtaaaacagatgtacatctatactttcgattttaagaaggataaattttggattgtgcttttttcttggaaacagagtatcaaaagaatcggtgtcaaaaaaagaatatcaaaagaatcaacatgctcaaaccactagaacattagcctaaaagaacatatgcagcatgcacaactctgagcttttacccaacaatataggattgaaaaacatcagccttccaccccccccccccccccccgggtcccggcgctctcatctcagccacaaatactcttatgacaataatacagcaacgcatcagcatcatcagcttaagcaatttgaggttttaaatccagatatttctctatagaagtgttgcaaaaataattagccttcatcccctgtagctggacaaggcaagcctctctaaaatcaggtgaacatctgtgaatatctcataacatcatctacatacacttctgtaccctcaacattcatcgaagtaccatctgctaacagaataaacctggaccaaaaaaaaaaaacaatagaacaaggtatacatcggactggactaccaccttaggccatcaagacgcacagaagcctccctgatgccatccatagcagagcacaaaccaaataatggaagatcagaagtgcacaagtcatttgggtttccttcagctaacatgaagctgcagtgatcttccaaatcattgtaagtattttcctctgacatgaagccaagtacagctccaaaatcatcatcatgagattggagatgatgcactgatgaccacaattctgtggaagagtcacacaagccttttccatcttgcttacaaggatgatctgtgtatggcgatagagagttcaaacaagcaccgtttgcatccatgaacaaagtactactgctgtcctttggaggcatatatctgagatgatgttgatgatccagagttccagatatgtagtttgaaaagcttgtataagtgaatttcgcaggtaactgatccaattcctgtataggcccaatatcagaattatcaaaaatctctgcctccttcgaatatttctcctccagtccagccaaagaagtttcatgcaacctctttgagcccaattgaaaaggatgctctgaagttgaaaatatggaattcagacaactcatgcttgcattcgacacaatatcgttgctctcacttgcagctaagttggagatatagctaaaatcactgtgattgagaattccatttctagtgtccaaaaagcttgaagcagaacattttgcatataactgatcaaagctagatagaagtccagtgtcaaaattaactaattctgacccatgttggtcttgcctttccagtccaactgaactagaagtaaattgctctagaagttcagcaccataattatgagagaatcttgcctccttttggccttgcctatccaatccaactggaggaaaacattgttccaaggggttacaagggtcaggtcgccggtaagtgtttgatatttcatatggtaccacatgtgtctcctcaatctgacagggggtgaaaaatctatttggaatggatccagagaatccttgtgacaacataggcacccatccatgataagtgcatggccttgtttcaacattacagttcaactcagtagctgaagccagtttgccttcggagtgtggttggacatcctctagcaacaaattagaaacctggttgtgagcagtgtctcttttccaaccagaatttggaagacccacagtgtgcacccatggtaatgccatgctctcacgtgcttcattgcccctgtgaggtaaatcaattttccaatcaagagaacctgaagggccctgattgtatccccatggcaaagccatgaattgacgggattcctgggttgcataagaggatgactctttttctgttctcagtttagttcgcaaatcaaagtcactaatcctgtaatcaagcatattttcaaaatggcatccggtgccagtaggagtatggccacagaccttcatcattctcatggactccttacggtgctacattacagcaaaaaaaaaaaatcaaatcaaatcatggaacttgtaaataatagacaaacatttttgagtgggtgatagtgcattacataggttcagcaaaggataccttttttatcatgctgttggcgcctagcctttgcaggatgtcagcaaaaaattctgatctgagaaatttatgtcatcaggccaaccattatcggacaacatgaaaatataaagtaaaggagttcttcaatatgtaatgtcaaccttctctgcaaaaactcagaactttccattgacatagtttttgcagctagctttaataattttcctctcttttctgaaaagatccgtccactccaaggttctatgtctatcatcaaaagtgaaaagaatatgagcttagcacattagataaatatagcagacgtaaattgctgtgagaacacttctaatcatatgtatctcgcaatactaatttatgcatggtgaatcagtaacatgttcttgtatcagccaacggttgcagaccaaatatcagcaaccaacacacttcagaaaagatgtgtcgtaggcagcatgaggaaaacaaacataaataatacaaagagcctaggattactgccttgcctgatagtaatttctgttattttcattcaaagagtatatgtatataagaaaaacctcaactaccatgggcgccattatttatgatggaatgataaccctacaaaatagtgcatttctaaaacaagttaacatccatacacaggaaatgtctatatatcatagtgacaatttccggcaacagcagtatagtagtcagtcactatgctatgtatttcttattgaaagatgaaaatgtctcaccagtgtttcttgaaattcctacggcttcaaacgaaacctgagttatgggtgtgtgaacatgaacagtcaagtaatcatgtgggttcaactgaggtgtatcattattgccatgttctgcagagaagacaattaatagttagaagagtctaaaactgcatcattcatggctaaaggagatcagagaaaacgaattcaaccagaatgggaagctttcgcattgacttgctcatggtagatttcttcattcttacaaggtgtagcgggggtctcctcagaagagaaagtgctcttctgggcagggagctttctgcctggcattacattatgcgattctacaaggcacagaaaaatcacataagatacatatgaatgatctgtttcaagtcatttagtaagagcgccaaagagaacaggagtatagtacaccctatggaaatgtatacagagttacaaacccatctgtttttcttcgttttgtttggagaaagaatgaggtctacagcctgactgctcccacaatttcttaaagaatttgtattcagtagttttcgcatcacaacctgcatggagaatgattgtgaaatagaataaagacatagaaacacaaagaaaaccatgtaaatgtaaattaaaatcactatcgtaaggaacaacaagcaaatggcctcaacaatttaacagcaatatttacagagtggtgcttccatgcttcatccctctgatggcattgcagaaaatactaaaagaacttcaaagggatatgtagcattcatccaccattgattcatgcttggaaattgcgcaactcaccacacctcaaagaaagatctgtttggttattacaactgggaatatggatgagaaaataaggaccctgtaacattgagaagactacaatggcatggagcccacaatatattttgaaagacaaaccaatccccctgcaagccgaagcacgcaacatgaagatacggaaatgggtagccttctgatagaattttcatacgtcatgaaacctaaaggggattatcaaaatccagactgttaagaaaggaattacagtgaggccagggccatatggaaatgtaccttggggtcttttgcctgtgttagcatcctgtctcacgcatatctgatgactgctggcttcactagcaaatcgaacccttttccttggcctcccacctgtcattagatactcaactatttaatcaaattagaaatgcggactaattttctggagaaaatctcattgaataaaggttgcaataaccaacatgatagtacttagggataaattagctggaaattaacaaagactacaagaggactataagcaaaggcaccccaaaaaaaatgcttattagaaacttatagagaaatcaaagctcatcaattccgaaacagtatagctaataacaaataaatatttttcttgaaagggcagattaattttttttaaaaaaacttaaaagtggagatcagcggctcacgatcttaaaccaacaccaaatcgtaccaaattgccaatgaaatgatcccaaatctacacataaaagccatgaacgcctctcttttgtattcagcaagaggcaaggaatcgcattgcgagttgtttagaattgaaccgcggattaattgaactcggcgacttcattcacgaacccccaatcccacgcaatcccaactcaaccagcccagaaactagaaacttctacctcgatccacgaacctagctcgcatcatgcaccggcaataaaaagatccctaaagccaagaaagaaagaaacaagaagcgccaccgatggagctgggcgatacctggggaggagggctctggaaggggcctcggcaccgctggggcctggaaggacgggccacgcgggggccgtgggggcttcatagaagaggagccggaagggacacttttagggttccgacgccggaggcgatccatcgccaccgcctccgccgccgcctcggtcggtgcgcgccaaaacccgaggaaaagccttcgccctttggcaattttctcgtttggtcctcgcgttagtatcagccttacggattcgtccacgagccttattaaaaaaacgtcgatcgcatctcagccgtccgatcagacgtgcacggtccagggacgacgaccggagacagaattagcttgtccggtgccagggcccagggatttcacaacgtcaaaacgaaatcatcattattatttgagtaaatttcacaaaactgcacgttttatgatcaagttgcaaaaaaccacacacactttgatacttggcacttaagtatatatattttttagtaaataaatggattcacctgtgagatgacgtggttgttacacctaggacgagaatatggcatcctattaattttgtgcgatggctggtaataggatgccatgtcctcatcataagtggaacagccacgccatatcacaggtgaatcaattcattgatagtgtggttttgtaaaactacactaccaaaatatatgtacttaaacgctaagtgtcagtgtgtggttttctgtaacttggataaaaaaaacgtgtagttttgtaaaatttactcttattattttttaagaaaacagtacaggtatgattgggaattttttatattcatatagtatatttaatgacaacttcaataccatacccgcaaaaattagaaaaactaaattttacattcataaacaatcaaaaactttttttttacataacgatatcaatacggttgaagaatgtaagcatgtagcactagcattgacaaagaacgtgacattgtatatctaccaataccatctagcaaacacaagagaccttgggagtactgccacatataaaagccccatatccggcagacccaccacatatcagtaaccaactttagatgacaaatattgtagaggagactcgaccgggtcacctggagcatctggattggcacttggaatgcatacatttcagttgcaaacaatctcgaggtctaatctccaacgataatttcacatgtactccctccttccctaaatgttgttgacttttttaaacatgtataactgtttgtcttattcaaaaaatttcagcaattattgattctttttctaccatttgattcattgttaaatatacttttatgtatacatatagctttacatatttcacaaaagttttttaataagacgaacggtcaaacatgtttaaaaaagccaacggcgtcaaacattatttaaaaaagtcaaacagcgtcaaacattcatggaaggaaggagtagtaagcaaaaccattcaaggatctgttgagcaaattctctgtttccggcacacccaatgtttacagcacaaggatatgcccaccaacaaacccctcaggtaaacaagggaaaacagtcagctacatcctgttatctttgtacagtgtgatggtagtacaagttaacgcataactcaatgcctctgcacacaaggggaaaaggaaacaaaaataaaaggaatacatacacacacgaaaagccaactgctcaatacatgaacggcatctgtctgttatatacagatcgaatgaatgaaaccagctcatccaaagagatacccatatgatacacaaaacaatatgatctagtggttagcatcaatcggtgcaccagaccttgcctgtgatatcctgtttgcatagattgttactaggcgcagctgcgtgctattaagcccctctagatatggtacaaatgctttcccaagcataatgtagatatccaccaagcagaatacaacagtctggaagaaagtgaatacgatatcagattccaaacacaaaacattcatttttttaaaggtgatatgtattaaacgtgcacatagtcatatattattacacgtagcttctgtgaagcaaaggctggaatgaatttaattatctaaaacatattgatacataatccagataacaatggtagacagcaggcagatggtcacttgtgattaaagtgcaattgacagtgaccaaacatggacatattattagaaactcaaaatagagaatgcactatggcactaacatagagcatggtaaattataatataatggaaataatattcgaacaaacccaaacatatcattttcatatatccaatttaaacaatcatgataaatcagtttaaataattttaggaatgactacaaatgggccatactgttcctgtgtatgaagtaaacttttgttgtataaatggattccgtacttatttctttactatcagtctatcacatgcctaccatgtttctatcatgttaactatcagtctattgccttctttacatgtttctatcatgttaactatcagtctattgccttctttacatgcctaccatgtttctatcatgttaactatcagtctattgccttctttactagcatatccctatgaaaactctctactacataaaagtggagtcatccgtcctcccctcgcacgcagcgcgtgctcccacataaaaatagaaaattccccggacaaaaacaaaaaaaaacaattggttaaaaaaattgcatgctttaggctaatccacaacccattctcagtagtatgggcccattgcaatgcacgggcatattactagtgtcaaagaacaagcaaagcaccttgcgaacatctggactctggttattgaaagcatcaaaaagtgctggtaaaaatgaaggcagttgagtcattaattcctcctctgataggcgtccaacaagctgcaaaattaccaggagaaaaccagcaaccaaataaggttagtatggtatgtatgaacaataaaattccagtatgagatggaacagctctacaagctaacatgtttcttgtaatataaaaaatatttacttaatctcattcacaagtaaaccagcaacgaagcttcaatgaaatagttgtataaggtacaccagtaatcaactcggtagttggtagttgccaagatattcaagttgtgacaggccttattagagataaaaataccattaatgactgcctcattgtactagtaacacttcaggaatctagaattttgagattattttgaatttgaatttacgaatatagacatataaagttattacaaattaaatgtaggtcaattacttctcctcattgtctgatgtttttattcaattatctttggagttggtgttgcatcaatgataattaaagcgtgtaactaagatacctttgtcaaacagttggtacacacgacaagcatcttttcatcatcactaaccaacaaaggtacaataacctgcagtgcaagcacaaagataaagaaaagtataagctgctagtaacaagaagtgtaaacaagtagtgttgcattaatatatactcttttatacaaaaaagggagctctgtacatacagcaaggcatctaaaaggatcatattttgccaacacgacatttaagcactggtttgcttcatttgaaacctgcaccggcattaaaaagggattagcccagaagcaagagggcttcctaaatgaggaaagtttaccttcgccacgacatccttggtcacatgtaggagcttttcaaggacaatctcaatggattcttccataggatctttctgagaatgataaaatacattattaatcaataagctaccagctagattacccaacatgcatgcagtttgcggacagcgtacctggttgtggagcatctcagcaactaacgatagagaaagctccctgatagaagaatccgagtcatccaacacctcaaggatggttgttaaaatttgattgaaatactattgagacagaggacccatatcaggataaagatactatcaatacaaaggcagcataaaatgatgaaaacctgtcaactaagctgcaagagtaacagactgtagctatgcattctggagaacaacactcacaatgaacagttcatagaacaatgacaatcaaaaaggttcttttcactgttactgaaacggtgaagcattcatcattttcagcaaccactgcatcaagataaatcaggcaaattgttctagaatggtgatgttttaagctatagtagtataacagtatttcataatcaatgggataatggaaacagtttgagttccctcacataacacgtaacattatcctgctattctttttccctccatcccttcacagaactatgctctctctctccagaaactctcatttattctcatactagtagtcacaaaaggaatgcagcatgagatgcagaactatataattgaatggcctaaaacatttactgcagctgtttaacccaattaaagagaaaagttcacatgaacaaaagaacatatgaaacaaagctatagtattgaaacttttttttcttataaaattaaagtgaaattataaaggtaaggttgcaaaccttagtccatatagagttgtcattattggtggaagctgtaaccaactgttgtaatgcctcccgcttgtctagactagtaacttcactgacattgcttatctagaaacataaaaaaaaaagtagcatttatgtatacgatgataaaaggtaaaattaacacataccagtattactaacaaagttgatggaaaaaggagatatttcaggcgtacctgatgaataagttgtgggatgctagggccattactggtgtgtggggtaatcttcacagaactaagctccacaagtggatttccctcttgagcgtcttccacagaagttgaaataacagcaccacgtccatcagaaacagcaagacgaccaaactccagacgaggagtaccagtagaattttcatcatcaatggtagcatctgattttccaggatagtctgtccatgaacgtgcagcttctacaactgtgcgagcaatgttctttgattccctacttgttgcaagaacttcagcttcaggtttgaaacattgcttaacattatcaatgctgacatcagaggatgttcggccagtagaaatatcaaggaatattgatccatgaaccatattcatcttcttccctgatgcattatcaagggaactagcagaaaaccgcccaaatgcataactactctttggtgtcagtgcataaccatcttcagaagaatttccaaaatcaacttggtcataagatttgggacgtgaacgttcttttttgctctgcaagtaatttaccagatcgacctcgatacgaggagtatattgcttcagtgctcgcctcacaaggttttgttcttcaatagacaaatttaaaataaaatttagaaccgctgttgagtcaaaatgagaataaactgctatgattccagaaatggaagtttccttcaactttgcattcttttcatgtattaaaggtgctagctttgaaagccatagcttaagaaagccactgttactataaccttctgagtctactttgtacctgctgaatgacttattagcaaactcaagaacagccagttttgcttttggagacctttgttcatccagtgaacgtactagagcaggtagcaatgtgtcaatgggatatgtgcggccaacaacttccaaggttgatgaacatggttgcctaactaattcctttggatcaataagtcttgaaaatacatacggtaaaattctttcaacatagctctcaaattgcttcttgcaagctggaataatatctgcaagtgtagagaaagctgcctgtgcaactttgtgatgaggatcatccaaataacggaaaaataacttcatgaccttttcaaaattctgcataacttcttgaatgcctttctgtccttgttgcagtagtgtctgaataaaattaaaggctgtaactctagctacccagtctgaacttgcactaagacccccagagagtgcatcgcttatagaagttggaccatctgtgtatcgcgacatgtcattagatgagatatggccatcatcaaaactgtgtctcgaacttgcagatgtccttgatgccacttgcttcctaagaggcctctggaagtgtggaacttggtgattgtgtaaatttctgtggctggcatccctataggtcatatcaagatagtgtctgtccatctgcatttgtggcatccgcctggttgaccatgtatcattactctcttccatagtgctaccatatggagacctcccagaagagcttctcgcataaggcagtgacgatcctgatattgattcagacgacagactactcaaatatggtgaccttgacctctctttattggccacatgagggttcactgtatctaccaagcgtgaaccaccatttcttgtgttattaatgcttggcagggatgaatccagcaatatggaattctgcaaagacagatggtccgaagcagttgcagcaagtgggataggaggatcacgagaggatggaggatcaactcctgcactaggaggaaaagaaaaaagaaattgagatttcttaagtatttataatataagtcggaaagcaatagctaagaattttaaactacataatgaaagagcaaactccaattaagcagcttaaagaataccaagatccaagcttgttgagcgcatagctgagaaattttgccggccgcttacacccttcaataaactttcaatggcagaaaccttttgtttacttgaactgagaacgctctctatgcttctttcagcagttctacctattttctttgactgcgacagaagacttcttgacgaaagagatgattcagaagaaatagctgcactcttgtccatcgcaacaatagctgaagtgctgtatccggctaaatgtgtaccacttgcatgagatgaagcatgagaaagttggacacccttctcacgcaatgatggagaaggataccgtttctgcaggcccccgtcttcatcatttattatctgcaagtgcttgcatttatcagatcaaacaaacagttatactgtgtaatagcagagtcaaataaccatactattttagttcagaatatcatttttctgtaacaaaatataatttttcattcataatttggtcgattttcattatacaaaaatcatttctttcaaatgcgtatgctgcaaggttaggcttgaaagaatttacacaggatacctagcacaactaactagtacaagcaacttgttgaaaacctgaaatatgaatgaattgctcgcccttctccataagcttaaggttctaggtgaatgtatggtgcatgaaactcaatgtagtattagagcgcaatgaactgttgcagcccactttggttccacaagcgaggcctgagggggcctccacgtgagggggagtattgaaatataagtacattgcccaacctcctctataaggttaagctttcgggtgaactcgttggtgtgtgcaactcatcttgagagaatactcctctgccttgaactagtaagcttgaaacatcctatttgctacatgcagatgcatgggatgggtaattgatatacactgaacactgctttacaagagcttacagcaatagccaaatacagaattgtatttgcaaattaagaatatgataatttggcatatattcttaaataaactagcagaagatattacaaaaggatatctggagctttccttcagtaagatccaaagaaaggtataaaaagttattgacttaggtatatgatgataggtacatggtacacagagctaatgtttcctcttattttcctaaactggcaacacaaggcaatagcacatgtaagtcaacctccatagcactttaagatgtcaacctaaactttatgaggaatgctttgaatgtttgattgatctttagttctttacaaggaaaaacatgcagaaaagtataatcgtataccctttgtactgcaggatcaaatgacataaaaagccgacgtgagcgctcaggccatgtcttggtgaacatcctatagcaagatcttgcagttgcacggacctgcatttgcaacacggcacaagaataacatcaaaacaaattttcaggcatttaataattaatactgaacattatggtgacttaagtcaggaaaaatggatggtgttagccctacctcactcattgcatcagccacacagcattttattagatcttcgtatatatcagatgcacgctgtatttcaggagcatctgcccaatattccaatattaggatggcatactcactacatctgacatagcaggaaataggcatgagtggctttaataaacaaggatcacaggtactgagaaaaaagacaatgctaaacacaagtacctagcacgaaggatagcgctgcgatcattctttgccgtgtcagctataagtggaagaatacgtgaaaccttgcagttccgcaggatctgaaagacaataattgtcaaaaagaaaaatgagtactgagaggttgtgccacagttacatacaagaatataggtatctcacagtttttatgcagttgtcggcggattcagcaataacaagcacagttatcacaacaagcttgaaaagtacctgataatttgatcagtatgttagccctactgaggaagtataagagtactgacttactgttgcaaaacactgaaacagcttctatggttaccggaataaatatttcagcacatgcttcaaaatcaccaaggagttcttttgatagcatattaagtagatggcatgcctggaaaaaaacttggtcagcaattttttctcaccaaggtttgttcagtcattgcaaattcaataagaattcttttttttctaacagaattccataacacacatgtacttctaaaatgaaatatttttggatgaactaatttgacagcccctcaagaattggtgttaaatcaaatacctgttttactatgctagaccgtcggtcagacagctgagcagataagggaggaactagctgcttcaggagcgtaagaaatgatggataatcaattgcacctgataaaaggaagagtttatttcaaacaaaaacatgcaaaacaatgttaacaagaaagggaataatacataattatgtaacagtatgtttgtacagtcaacagtgagacctaaaacatccctgtaaaattataaacgtaaagaaatttaatttcactgttccaatatatttattttcatcacttagcttgtctttcttgaatgaatttctaccagctatatgcatcattattggtaaatctgatatgaacttatcaatatggcattcaaaatcatggttggttggtgggttaccaagttaagtaacaaagcaatgccacattccccccttgactttgaaaaaggggattggttacctcagttctatttcactgtttttgttactaacatgatctatctctggagttcccttttcaacttttacatgctggaagaacttcaagcctgtgacatatactttctaaagaaagctacttatcaacactatccaatgttcaataaaaagatacagcagtgacaaatatctaacctccatataccaaggcttcaatcctttgcattgcggcaatacgtatagaccagtccttttctggatcaagggcagatgcaatcttctccatctccctaagtaattctttctctgaatgtactcttatgggttccactggtttttcggtaatatctgagtcacctgtaaatggcacaaaatccagtggtatatgatcaatatgctgatgtcgctaatgataaaaagcttcacatatgataagttttgtctagacccaatgttgccagaaaagaactgtcttctgaccaataactaataaatttcctaaattgctacaaaagctcctactaaaatggtggaatccaaagcctctaatgtataaactaagcaaagtaaagatgttgtttctatagtgcatgccttttaccttgagtacctggtaaaaagaggtgcattttaacacatcaaaatgaatttcacaaaaacaggaatgtacagtatttgccaacaattaatacgcaaaatctttcaaggcctatatcagtataattttgtgaaggatcagcatgcatatagaacaaacatgtatatctactacatgtgtttcccttgatctacatgtggcatctgccaatgatctctgcaagaattttaaaatcatgaaccaactaaatcacagttgcatgattatataagaaaaatgacatgtggaaaaaagcactgactcactgtgcatggaaaagatgctaatattgcgttgttagatcagcaccaaattgtggcaatagatttggcaatttgaaagagctatatcaacacttatatgtgttaacacatacttcttccaaaaagtttaaaatcattgaccatacaatcaagaagagctaatagtgtaaactcccagtataagaggagctacaataaggcagctgaccgcagtgagaagatagtgaagggcctaacatttgtttagagtaaagtcatagtaatgattgcatgctctagtaacaatcatctggaactccaaaaaagtccactcagatgaataggaatttacagcgaagagcatggaatctccagttatgcttagccattacttaaaattttgtcgatacaaaccaataacactttttttcatatttgtacttttaatcaaaatagaaacaaagcttccaggaaattcaaaagtaaaacttgcctccaaataatgtgctttcccttgttgaactttttttccttggactgcctctttttgcattagcacttacagatctttcaataaccttatattgcattctagcaccatcagatgagcgagcctttggttctattttatccaatcttgaatttatgtccttcagctaaaaaaaggcaaagaaagattaatcagcatatgacaggatgcctaccttaaatttgcacatgcaaggataagacaagctcacgcagtttactactaatccaactttgacaggaaagcaaccaataatgatggagatcagattggccacatggattaccatgtaagaaggcagattatggcgctgcaactcttcatggaattgagatcccatgtttctatacatctcctgcagtgagaatagataatgtaaattattaagctacagaaagcacttcaacaaaatatatgtcagagcatcactgcatcaggcaaagacagatgaagaatagtcaacaggttctacattggcaaaaaataaatgaagcaaaatatagtttggtcaaaagaacaaaagtaaaatataatgtagcacattttatcaaacttgtagcacattcattctacagaatacagatgattctaacattcctctcgttttattcataggttcactcatcaagattatccggtctaccgtgtaccaaaccaatggaaagtgaaggctacctctacattcttttcttcagtcatattccacttcctagaatttgagtataggcaaatcacatgaccacacaaaatcagtattgcttatttttgcatccagataagtggtcccaggctaaagtgaatgttgttacccagagagcatccaagtaataaagaagtaatactccactgttatattaactagttcaaacattgttcaaaggaagaatggattaaacagcagagactgcatattggaaatggaaagttcacagaagaaaatgtgcaaaataatttgcatccattgcatatattatcttggtaacagaagaaagtaaacctactatacaatctacttagcatatgaagggtgcaaagtgtgaacattgcatgcgggtaaaacccctgaaaaatgcaatgaaaagtttgaacaaatagcaaaagtgtgagttgcacaacattttgcaaagggatcacctcaatacatgagattgcagcgtctctaacactttgattcaaatcgttcagcaattgcaggacctgtaaagccaaacaagtgtagcagctaccattagcaatcatgcaaacaaaataattgtaagcagaacagattgaaatataaaaattatcttgacatacaggtgaaagcaacactcgctgtagagggagctctgtagaagcaaagaggccaacagctgttgcaacagtgcgtacaaattcttcccgcaccctccagctcttgtgagtccatgcataacttccagctctttcaacaatgattgtcggtgatgaaacctgagaatgtagagagtaaaaacagcttagtataccccgcaaaataatatcagaaccataaaggtccataagaatataaatgaatattaacattggaaaagcaacagtccaacaaaagatgagaaatctccatgcatacaagagaatatacagcctggaaaataagctcaagccaccaaggacattttttaaattcaaagtacaaataagtatttattttcaatggtgtagcaaattagcaacaggcaatgccatgtttcaaatgcaactaaaacattgattttgaagggctctgtccaaattcatagctaaaggtagctatattttgagacaaagggagtaaaaaagaagcagcatgcagaaaaggagaaatataggttcaactagctaaattctgtgtgttggtaattggctatggaaaaaaataatcaaacatgttctatatccaaaataagtgaatatgattttcgaacaaacatgtattttcaccttttgtgtgtgcgtgtgtgttatagacatgacaattcagtcgttttgggctgttccatattaaatttgatttttcttaatggcaaacaaggagaattaacatgtggaagtactattgtgtaatattgaagaaatttaagggaaaatccagtatagagaagatgtggtggcagatcgacaaccaccactactgtcatcttttaaaggagtaaaaatgttgtctctgcttctccaaaatctacactgggcaccttaaaacatatatcatgaagcagagtagcagactaaaacatccttccactggaaagcaaaatacagtaacaaattaggtatatctatatgcacatattctcctccaaatttctatcttcatccactcatgaaagcatttgttgattaatagcacataggaatataacgagctccaaactagtgcctccattcacctgaaaacttgggaatttagccttgttcaggtcacaatatttagccttagtccagttcacgagtctgttcatttaactagtaactatcacctgcttcaactaagtatcactattcccttggaatattgattgcgggaaagagtggatagcaatggtctcttttgttaagaacaaaaaaaaatgcataaccttacaaggagaccaacaattgttggtataacatagtaccaaacatgactacgcacaccaataatgtgaccatctgaaaggcatccaaagatatccctgaaagttatgtgattgcaattttgctcaacggcttacttaccaaaataaattatactccaatatcgccatcctcaaactacagtgaatgatcaaagtgcacaactaaactagtttgcaatcaaggcttgaagccataatcttaaaagggcaagggacattttcaatttacagaaccagccaatggatttggcctaaataagtaactacctccttaaactcaaattatgtactgcatgcatttacaaagcagatattgtagaaagttcaagctaatgatttcaaggattcaatttcacagctgcacttaaatccaaatggcacatttttttacctaaatttaacgataatccattagatcacggccaactaatatatttacagctaataatctagctcgaaatgagcaaggccgccaaccccaaagctccactcatcatccacttaacccacgccatttaacccgcaagtggcgtccatgcagtatcaaagcacagacgaattgagattttccgctcgaagagtaatttatcataactaaatatacacataatcgaacccgcattttccccaaacctaaaccggtaagagcaaacgatgtcgctagcagaaggcgacacagcgaagagaaccagacctccatgagggtgacaagcagctgcctggcggcgtctcggacgggctgcttgccgtcgcccagccgctcgacggcggcgggcacgagggcgttgaggtggatcttgaagtggtcgccggcgagcaccgcggcggcggagagcgcctgcaggccgccctgggcgacgcggaagttgccgtccttggtcagatccatgcaggcgtcgaccagcgacgtcacctcggccgacgtcagccctcgcctcgccgcggcctccagcgcctcgtggagccgctccaccccggccagccgctgcttcgtgtccttggcgcgcgccgcctccagcgccgcctccatctccgccccacccccacccgacaaccaaccgaccgaagcttcctcctcctcctactcctcaccggcggcggcggcggcggcgaccagtaggcggtggttgggtcgcgcgctcgcgatgatttttgggggaaatgggagtggtcgcggatctgagagagacgaaaagggaggggagagagagagtgtgagacagcagcgagcagagtagtttcagagaattttgtgcacgttggtccctgtcatttcgtaatgtcgcatgtagcacccccggagaagtccaccgtactaccgccgtatatttgactaccgtttgactcgtatgtactactgcagcttaatttagattttgaaacttaagtttagagttaattttgggttgtttttcgttttcttcttttttcgacctaggctttttaatctgctaataataagtatacaagttttagtttatttttcaactttagtgtagtttgtcgtgcaattggtgaattagcaaatttatgagtttgtgacttacagcaattattgtttgtaccactagaactccattcttcatgaaaaggatggaacgagcgtagcataatgagatagtagtagggtggaaagtccaaccaaaaagtcatcacgtgaaagaaagggttaacaagcgtatgtgaggccctgttctttttcatggaatggaatgatggacaaatacacatgttttccgagcttctagacattcagttattaaaaacattcaatatataaaattcttataaatttgtttgaatccatttttcaactttatagcatttaattcatccgcttgtaacctcaaataatatcacaaatcattcaaatgtgaaatcttggtaattaaaagtttgaatcgtatgtgccgatttgtttcaataccatccatcagtcccatgccgttagcaaccgaaatttcgatccctaatctttgctggatttgaactcgcatcttagtttgttgagctttctaagttaagcagtcaagctttcaatctatcatgcatgaagtcacctaaccaagctgggatggcactgtcatctaacaacatatcccttcagtaagtgaaatctaacaaatttggtctctacattgccacaatcttttcaagttagttggatatctattggatgtagcatgtaaacctgattcgttgagctccggcttacaagccaccgcacgtgattgttcacttcaattttagaaatgtttcagtctaataaagaaagccctttcttaaatttgtctgctcaatgtttataagctaaatcaacctaccaagcagatgctgaaattaggcggccttcagaattatgggagtagatatatacctgagatagtgagatgaacaccccaattatgcttgtaattttgcaaaagcatagggctatttttgggggaaaacagaggagagccggggtgataaagctaggattagttgaagcgtaatgtcatcatagttggtgcaagtgcatcttatgattgacatgatgataggtggtcctccgcagaacaaaaacaaataaatctcgatgaggatttcgttcaaaaaaaaaactcgatttgagatggtactgtaatacgagcgtactaagacctcgattcggctttggataaagttgttgtgtttaataagtaccaagttggataaagcttccaatccttggagtcctactcctacaagttgtgataaaaagctatatagtactgctacatacaccatacctaactatgttctgatgcagcgaattgtcgcgctggcttgtttatgagggaaaaatcgatcagaaattaatcagacgagatgatggaaagttctgatgcagcgaattgtcgcgctggcttatttatgaggggaaaatggatcagaaattaatcaaacgagatgatggcaaagtgtgtttgttcatctgttccgttggatcagtatgggaaagcttgttttctcctcatcacaaatcgatcgagatgccgccagtcgtctcgagatatcgttgatgtctacagcctaacggtatccgtacataccgtctcctgaaaatcactaccgtaagaagagtattacacctgttcatcagagaatgaaaatgattattttcacagccatacatagctgcccaagttcaagcctaaattatgcctgatgccctgatttaattagcttcttattgtcgttagcaaaaatcccgtttggtactggagacatatcttatctggacaagagcatataattattagcataaagtatacttaccatctaaaccgataatcatgcatgtctggtgagccgtccagtgttgttaatagcttacaaagcggagcgacatctggtacatgacagagtaacctgcctgctccaaagtccaataatcaatattctcgggcctgatagcaagtgagctaatccgagtaatcttctcctttaaacaacaatgatgatcaattaagccattgattagttatgttgtgcggctagcagcctggtgtgaagaagaggcccatactgcatgagctgatgagcgtggagcagagccctgacatcaaacagttggtacttggtaggtactcagtgcaaagtcaggactggtagctggagtggcagccgtagagaatgacgacgcatcgatcagcagctgattggattgtgctcaagctgaacctccaaaacctcaaaaaattcacaattccatcctggcttgctctgatgcttgtgagttgtgatgattgatgaggtcgggctaccagcagcagcaggaggagaaagggatttccgctcggctcctgcagaagcaaacgaagacgatctccatcctgctgacgcgacgacgcatctgcagcatgcagcgcaggctgaggggaagagcagccggacacccactaatcactttcgatctctctgtttgtttggtctgttttgctctctctgtctgtttgctctgtttgtgtgtgtgtggcagctagcattgcttgctttctttatcttatcttgcttttctccacgtcttagcacatatccatcagtcatcaaaataccgaatgatcatagtatgccaccaccaaaagatcgcaattgcaggttggctgacgccataaatagagcctcagcctctgcgtccatttgagcgtttgagacccttatttcttcagaaaattcagagaaaattcagagtagtaaagtagtatccgtttggtacgccgcatgcatattgggccgggagaccgcacaacggagaccgggccttctgattcgtggcctttgtgacaatgcagcctttttgtaaaaaagaagggttcactttaatgccaaaaaaaaccttaccaaattttggtattaccaaaattttggaatagctgccaaaattttggcaacttactaaaattttgacatgatttcttatagagttaccaaaatttggcagcaaactaaatgtagggctggtttggtttgaggcctaaatttggcttaccaatatttggcaattttaatagtgtttagtgtctatttggtttgaagccaaattttggcatgcctaagaaaataggccatttcaataattaacttaggctattttggcttcaatccaaacacaactttaccttcccaaaatttgtcatgccaaaacttaccaaaatttggcattgccaaaaattggtaaggccaatttaggtcgcaaaccaaactggcccgtagccattttttgttgacaactttaccaaaatttagtaagattgaaaatggcatcaaagtgaacagacccgaaaaggaagctgattgtggtcaagcaccaccaccaccacaagtcaacactctttttttttgacgcaatcaccaatgaaaacggtatggaaattttctgaccataccgatatcgtttccgtaaaattaatataataataatatttttaccgatggttactattttcaaaatttagtttttttaatttctgtcagcgtggcattgaagttgatgaattcataaatatgaaaattttacgactgtttctatttgtctttaaaaagttaataaaataataataccgtttccgactatttccgactatttccgaccgttttcatccctaatcaccacttcaccagtcaacactcaacagatcgatgagaactacagttaagactcttcatcacatatcacacgacggtgtggttagcctgccagcaggtgaaccgtcgccattaatcgtgctaaccaccagcatttgtacgtacatatacggaccacttctgccaggttttgtattgtacttgtagcgagcattacgagtttagaacttaatagtagtagttctttcaagactctcggtcgtattgaagccaagctgttcgtttcaaataacatattgaactacttcctcgttttatattataagactttctagcgtaacccatatatatatatatatatatatatatatatatatatatatgtgaatgtggacaatactagaaagtcttataacctgaaacggaggtagtaataaggttgcagatttaggtcgtaaccataatttgattttagaaatttatgttagagctgatttcggagtttttttatttatcttttcaggcttagcttttataccactaagaacagaaatataaaatcatattctaaaattatttttatcgctttgttgtagatatatcaatctggtactcacggtttcagtaaaaaaattgctctccttctctcttttgcaaaacagtataaaacatgctcgagtaatatctctcgagggcatgtgaacaatatttctactgtgtgttgtactttttatgttctaaaatataagtatttctactagtatcatctcgtttggcgttggacgtctgaccagcgctactctgcgcgttcggcataccaggcattcttccatggtcagcattcctttgcctgtgctgatcttctatggcacgcaaagggtcctgctaaatacacgttcttcctttggtatgcattctagcagcgctgctggacggctgatctcctccataagtgtagcatcgatagtcacttggcctaccttttttgtgcttaggatcttgagacggcgaaccacatcctccttgactgtgtgtttgctcggcaggtttggctccgtgtgctgtcacctcctggctgggctgccctctctcccccgtggcagctggttacaggactggtggctgtcctctagggcctgcttacttgagcatctctgtgctggcttcgactccctggtgctcctggtctcttagcagctgtggaagaaacggaactctagggttttcgactctgcgctctctttagtctcagtggttctggagtccatccactcagagggctatctatagtctttagctggcgttgccgcttttggggtcctgttgggagtgtagcgtggctcagccccttcctactgcttggagtttgtatttagccgctgtagttttttaagctccagcttcttattttgctttttttccccttccctttgcataagccggtctgactgattgcatcatgtaactataactcttttattctaatatatgacatgcaatcattttgcgcgttcgtgaaaaataccatatattgaggttaaggaaaaaagattctcttttatagtatgatctcctcaagtacgtgaatggctgaaaatgtatggattttcgtgtattaaaattagtacctcataaatgattatattgcagtataaattttgaatgttagaaatgtttatatttaatacggagggagtaaatatgttctctaggtaaaaagcacattcccatctcccatagcttctcatttgggtgagaatatgtctgaatgactgaatgtgagatactcctgtaaaagcacaggcactgtcacgccatggaataccaacgtatactaccaaactccatgtaacttgaaggcggtagagctgatcatcaattggttcatcacagcgccagcgaagagcacatgaaacggtacattggtacagtacaacaagccaaatgctcgcctcttcttggctgttttcacctccacagaactgatgtctgatgcagagtcttcagaaagaaagaaaaagaaaaaggcgatgcaggacacaccaatcaatgccgttcttcttcggatcgagatcgatatgaacattggcaagatctagatcgatgaaataatcaatggctacttctttttactgtttccccgtctaatttcttcacggaacgcacagttctgagttctgacggccggttggcccacgagacaaaaaaaaaaaagaaaagaggacgggccgaatgattttaattctcagccaacttgggcctgtaacgatctagcccatcacgacccattcggttaaaacacctgggtaataacgataatgcttgtcgccgggcgaccggcgcggggggagccggatcaagcactccccccacgcgcgcctctcccccacgtgctacctgttgtcccacacacttcttccttcctttttccacaatagatgtttcacctagtgtatttataatggttcactatttatagatctaatgttgcagtgaattaaaatactcttttgcaacaaaaaacgcacatattttggaaactctctattaaggaaatttggtttatttttttccataaaaaatattttacctagtgtactcacaatgttttactatgtatagatctaatgttgcagtgaacgaaatattctattgcaacaaaaaaacccacatattttggaaaccccctattaagagaatttggtttattttttgtttcaccgaaaaatgtttcacctaatgtaatcacaatgtttcactatatatagatataatgttgcagtgaactgaaatattttttcgctatttgctgaaacattgtttttatataaggtgaaacaacacccgatttaaacgagtgaaacattttcaatcacctagtgagacaattccgatatagctggtggaacatcgtgcaacatttataaaaaattcaataataagctaatcttttttcgtcggaatatatccatgtgtaatcttgttttgaagatttaattgcaacgaatttaatggtgcaatcggatcatgatttggataagtaatttaagagaaaaatcaatttaaagtagttttgcacgtaaatcggacgctaatgtcatgatcggtcgtccgatccgtatgccctcctggataataatgctaagtgcaaattggctagtggtttacaaaacagcgtgagttatcatgattatcgcgtaccgtaatcttcttagtttttgataatcctcatgataaacatacggttttcacggtccgggtcgcaccgcgcgacggcgcagccaccattttctcctgcgtagcgccgtggctcgcagctaactcaccgtcacgaacatcgcgcgttcgtcgcgacaatctccccgacgctgtgccagctacagatctgcattgatcaccgcagtattattgtactgctacccaaaacatgtcaggagcaatcgatcggcgaaagagtacaggttgattgttcaactcgtgtatcaccagatcgggaagccttttctcacttttaggacggcatgaagacgatgatactggtactacgaagaatcactaattctggaagaatttcttgtgtccagttcaacaaacaccgtgtttagatctaaatttttcttaaaacttctaactttttcatcacatcaaaactttcctacacacataaactttaaattttttcgttacatcgttcgaatttcaaccaaactttcaattttagcgtgagctaaacacagccaaatcacggtgacaatggactagctcagcaggcaggcaaagcacaggcaaatgtgctctttctccgacggtgaaaaactccacctttctcgtttctccgacgcgaagagccagactagcagtagcaaggcacggatgatggcttcatcttgggtactactgcagcagtgttcagtaaatgcactcgcgattctttggatcattccactcaacggcataaggcaacaagaaggtctcaacttcaagagcctgcagcaatacaaaagccatgttctgttcgacctatttgcagaacggaaatgggatacattaagactgtgtttagatctaggggtgtaaagttttgttgtgtcaaatagaatatacggatatacatttaaagtattaaacgtagactaataacaaaacaaattacagaatccgcctgtaaactgtgagatgaatttattaagcctaattaatccgtcattagcaaatatttactgtaacaccacattgtcagatcatggagcaattagggttaaaagattcatctctcaatttacacgcaatctgtataattagttattttttcgtttatattttatacttcatacatgtgtctaaacattcaatataatagggtaaaaatttttatcagggaatcaaaacagagcctaatatataaagctttgtacgatccagaaaatgcttagattatacagtacaagattatactaaggtcttcttgcttagattcatacacacgcaataagcgcatataactatatatacaaaatacaagagcgcatacaactatacaaaatacaagtattcaagcatcaaactctaccttgcgtccatcgtggtgacggaaaacccatgagcccgtggtcggatggtcacacaggaaccatatgcgtccacgggctacaggctacagctgttccgaacttccgatcgattcgtcaccacgcgcgtcgccttggcgtggacgggcttgctggacgccggcggcgtacgatgcgccgtacgcgcggtaggctagatcatcccagcaggcagatgccgaggaggggcatgggcgatcggtggcacgcggaccggcgggcagcgccacccaccagtcaccagaggcaagcaaaggccggatcgagatcacctgcggttgcaacgtggactgcaactttagcagtcctcgcgtgatcgttagatcaaaaaagaacatatcagattcgaccagaacactgtagcgcactatagcatgttattgtagcattggctgcttggttgtgacgtggcacagctatctgtcgttcatcagcttgatccaacggttatgaatggacgggactgcctaacttgcagtcactataataactgcaccggatcttgattcacaaaggccgtagttggcgcaggtcaaggcctcggaggctcggagccccagaggatctccgccaggatgccgtccggtccgggtacacttaacgacgatcacgacgccatcttactctctttcagcttttggggtacctatatatttattattattgtacctgtacgttactacggaatatttaaatgaaataagtgtatatataacggtcctatcgtttagcttattcgtgaaaagaaaaggaaaaaaaattgagaaaagaaagagagatcaagatcaaatgaggtggtggcctagacagaggggattttctacaggatttatatattatgaaagtactgacatttgaaacaaagaattgattcccacaaatttttctagagtaaatttgaagaaaaaaaattatgagatctcatctcatgttttcttcctttggtttcctgtgttttttttgtgtgtcaatcaaacggaagtttcaaaacttcatgaattttaaaatcccataggaatctagtgaacatgacattttattactatggttttttcattaatgcgtgaggagggaaataagaatcatcagttcttctcatttccgttcatcgatcaccaagttaataccaatctcacttcagtgccagtgtggaaattaatttactgtggtccttgtagctaaaacaagtaatctgtaattgcatactgtttgttggtggtcagttcaacttcaaaattctaccccactgttttatgaatttcacatggcatgctactttactgatggaatgcttctgcattgtaataaatggaaggcgggatcaacagtgtcaaaagactggaaggtgtatctttttgtaagttttggaaattaggtgttcgttgaaggcttggagtactgcattggttttactgaagtcggaaaacaggttatcatgtttagtatggccatggattttaatgaccgaactatgaagctaacttcttgtggttgatatactgtgtgagtggggcctttatgcagattatcagtcagtatatctattttcaactttcagatgtgtatgtaagggagtagtagtaaaagtagaaaattgtagagaataacttatgttcaatctttgtcagttcatccatgaatgagaagtgcaaagggtaaaaaaattcatagtattatatactcgtacactaagaaccagttagcattgctatgtgcttgggagtggagattctcaaatagaatttagtaattgtgggttcttttatcttgtgttgatatttattagtttatatttattttatgctatatcagtgtgtgctgagtttattcatgtatgaactttgtaataattgaatgtagcttgctgagcaaaggccaaaatgtacgttattccattactaaaaaaaatgacatgtgatagtactacataagaaagctatcaatattagaaaacactaattccatctaaaacagcaagagctctacgtatttaataggataggagcggagaagctcacaatgattttcagcaaaatgaggtcttttgtcctcgttgtagtccatttactagctcaccaccgtctttctaagaggatctcctagttgcaactacacatcaaaccaacagaatggatgaaccatgcaactgtgcaagagtggtgagggaaaaccatctcggcacaaaacatgccctagaaagtactctcaagtcgatgattatcatagtctcccgagagttgtgaaggagagaaactcaagagttttcagaaatctcactaacacttcaagatccatcacgggctcatggcaagaattaaggaggaagcacatttgtgggtaatggcgtgggcgggagtgaagaatcttttttttgacggaaaaatgattttttttttacggaagggagtgaagaatctagcagagctatatctgttgcaagaataattcctttctttctttggtcagggataatcctaactcccacggccagtgaatatataagacaaccttcttaccttgcttttcaaaaaaaaaacaatgatgttcagaactactacctccgactataaatataagaatttttcactaactatatagataagtataaaaatattatatttatgaagaaacatagttctatcaataaaaaaaattacaaatatgatgcaaaacaatatagaataaatttcctgtgtacccctgaaaactcactcaatctctttcatactctctgaaatttaccgatcccttctatacccctgaaatttcagcttgatcccttacatgcccttaccattacatttttcttcatttcactattacgtttggttgtaagtgtccttttttatccttgatgctttagttttgaatataaacttgaaaaaagattgaaaattttgtttgagtgcacagtatatgcattttatgaaactaatgagactaaataattagtgtagaaaaatttaacataaattttaaaaataaaacaaatgtaataaattaaaattttcattttaaattttaataggacaatggatatttttgatcggaagcattctgttgacgaccaaatttggtaatatatgaaccagattcgatattgaaatcgaggcggattcggtagagagatggattcgaagaacagagcatgcattggctacgaaggcatcggctggagtctgcatcgactgagatggatcggacagataacatccgacacagccgatagaggtgatgtagccgattccgatgataatggtttcaaagatgtttctagaatcgatcaacgtgtttcacgaggattgccatgatggagataaagctctcggataggcaattgtatttattaattaggatatttcatgtaatttccttagagatatatttgggcaaaagtttaccgcaaagacttatggtatcttagagtttgttagagataagtgtcgtgtccggcaaggacatattttgtaatctcgggtataaatagaacccgaacccatgtaatcaattaacaatagttcaatacaatcttggtgcatcgccaccctttttactttcgttctatttcgacgagttcttgctttcgggttgagctacatcgttttgatcttcaactagaggtaaaacttgttatggcagcttgcattgtcgggattagtgcttccatctctatgacactctaatcttgattatgtaatctgtcgagttatcatatatactttgcaatctatgttagttgcgctatataacttgttatcagttggttcttattgttaggaagcaatcggtagagttatgttttgttattgatctagattgtatcgtgtatataccatcttttgtaggttttcatcatcttgtctagatcttatacttgtctttatgcttaatgttgcatcggttaggttcgatctattaagtaatatctataattatgatatctggcttcttttatgattatcaagagagatagtatcggggtttcagccgatcttacctaatttagctattttatatcttatatgcttaattgatatgctaagtctgccctttatattaagatcttattgcaataaagtatattaggctttctgtttgatatattctatttgttctagtaaatggtatcggagtactagccgatacgtgctagatctatctgatcgtctatgctataaacatttataatctttgtattaatgtatacttcgatctaagtgatttatactgtctcggcatagcgaccgatctatcccaatcacctagtctaaatatacattgacagaatgattatatagcgttaatatctacagccgatcgagtagatttagtcttatcttgcttatttataacagccgatcgattcacatatgacatcggcttaaagataaatgatatgtcatcgacaactagccgatcggctatcgtttatggatttaaccgcggtttttcttgtcttttgtttcttgttgattgcaagatcaaattgactagcacgcttacgaacctaaaagcaagattttggacctgcacaggagttaagcagatcttccaggccagtgtgtgtttttcgcatcaaaacattcataaaaaaattattgtgaacattggtagtcctatctttgtatgaatgcttctcattttttatgactttcttttaaaaaataaatacatatttttttatttatttatctaaaaataaattttgtgataaataatgcatcacacaacaaactcataactctagtagtcttatgcgacaaaattctactgcatttttaacaatgtaattcatgaatttctatgttcatccaaaaggtaaaatagtcatttttattaaaattagacagtcaactaacggttaactgacgggagaagtatggaagggatcaaaatcaaattttggagatatataaagaaataagcaaaattcaagagtatagaaagctaaattttaaaaggtatatatagaaaggattttctcaacaatatagatacagaggcgaagccacgtgggccttccctatgtacaggacacagggtgttaagcttgctcatcacgcaaattttctccgcacaacaattagtgccacttcccttcgtcccttaaaaaaagaatttaatatcggatgtgattgtaacatattctagtactatgtatctgcacatatttatatttatatttgtagtaataggatgtgtcatatccagtactagattaactttttactgaacggaggaagtattatacatgccaaatatgcatataggacactccataatttttattctagattcactgctaaacaccagctaaatagatgatgcaaaacaaccagatcaaccagtgaataaggtaatcacttctttaccacacaaaactcggactacataatacaaatctacaatgaatgcacaccgtacttgagtaaattaatactgttcaacgaacaatcccaaatctctccccaaacaccaaacaagacagcagatcgaggaccgccccattatttaacagctctcatatgcatctgaattctgtaacccgctgcgggcaacggccggacgtgcaatccaccagaccaccaccgaaaccgcccctgtggtcacactcttcctgcaggcgcgcgcatgaacacgatccaaggcggcaagccggcctagctacctcccggccggggcacgtaaatgcggctccaaatcaaccaaccacctcgcatcattcaccgcatttgccagtatctcacctggcaattttttttacctttgctgcaaaacaagttgttcgtgtgtcgatcgagccagagctagccaaggcctctataaaaagagggatcgatctacccagctactactcgagccactggcactagtggactagtagagcgtgcatcttgatcacagtaaggacaggtagagagtcagcagtgcttctcacgtccgcgagcgagaatggtcgctgctctcgtcgttcctctcctcgtcggcctattggctgtggctgctgcaccggcgccggcgtccgcggagcgggccttcttcgtgttcggcgactccctcgtcgacaacggcaacaacaactacctgatcaccacggcgcgcgccgacgcgccgccgtacggcatcgactacccgacgcaccaggccacgggccggttctccaacgggctcaacatccccgacattatcagtgcgtagtactttaactcctgcatatttcagaaacagtgtgtcgacacgttttgccgaagagctgacgaccatgggcgttttcttcaggcgagcatcttggggccgagcctgcattgccgtacctgagccctgagctccgaggggacaagctgctcgtcggcgcgaacttcgcgtcggccggcgtcgggatcctgaatgacaccggggtgcaattcgtacgataaaaaatgctcaattcatttcacttcaattcacggccgtcattgtgtttccgtgtttcttctcaagattttcatgtgcaaccatgtgggtgtttgtgcgtgaacacaggtgaacataatcaggatcggcgatcagctgcagtacttccgggagtaccagcgcaagctaagggctctggtcggcgaggagcaggcgaagcggatcgtgaatggtgctctggtgctcatcacgctgggaggcaacgacttcgtgaacaactactacctcgtgcccatgtccgtgcggtcgcgccagtacgccatccaggactacgtcccgttcatcatctccgagtacaggaaaatcctctcggtaattaaagtgcacgagatcgccttgtggcagtagcagtagtagagtagtgtactagttcacgacctaccaccgcgcaactgtcaactcaattggtggttgtcacgctcacgcacgcgctgacacaccggctgcttgcgcgtgtgcgtgcagaggctgtacgagctgggggcgcggcgcgtgatcgtgacggggacggggccgctggggtgcgtgccggcggagctggcgctgcacagccgccgcggcgagtgcgcggcggagctgacgcgcgccgtggacctgtacaacccgcagctggtgaacatggtgcgcggcctcaaccgcgccatcggcgccgaagtcttcgtcaccgccaacaccaaccgcatgaacttcgactacatctccaacccccagaactacggtatatacgtgctcccgcgacggcggcgaccgtttgatcgatcgaagccgaacgccgaacttgactgatctgaacccgttgattgctttggcaggttttacgaacgtgcaggtggcgtgctgcgggcaggggccgtacaacgggatcggactgtgcacggcggcgtcgaacgtgtgcgacgacagggaggcgttcgcgttctgggacgcgttccacccaacggagaaggccaaccgcatcgtcgtcggccagttcatgcacggctccaccgaatacatgcaccccatgaacctcagcaccatcctcgccgtcgacgacgaggaacggcgcctctagataaatagatagatatgtacaccgatcatcgatcgatcgtcaggactatactagttaccatcaatggcacggagtataatacactctccacgtgtaacaatttcagttgtttctagtgtatctgttggctgatttcagaattgttggtgctttcgtgttgtagagaaaaatggactactcctacctgcatcgagacagtagcgctagcacgaacaggcgtgagccagcttctaacgcaaaccagaatttgaaattcctttccgttgcaatcatccacggctcatctcctccgcctcctcctcctcacctcgagacaccagaggcattatccgcgcgcggcttctcctgccattccttctcccaccttcgttccctcgcgaagcagccgctcctctctctcgccatctctccgactcctccggtccaaatcccccccccccccctccaaatccggttccaccaaccagcagtaagcaagcctctccctctccgcctctcgtcttcctacgctgcgcgcctccgcccgctcggttcgtccgcgagttcctgatcgtgatcgagccggttcggctccgatcgccggccgccgcgcgcaacgtgttcgacgaaattcctcggcggcggggctactcacccgcgatcgctcgatttttctgcagggaccgcacgcgatggcggcgatgggacatctcggcgacccgtacgcgctgcgctccgtcgcggaccttcccccgccattccgctccgttttcgggttcaggtgcgcgcgatgcatcatcgcatttgccaatatcaaactccgtgggccgcggttacggtgtttgcacggtgcatttctgtgtagttgtatgatcgcgctcacacattcagtagattgagattttgagtagccttgtagtcgtagtgcatcaggctaacaaaacacttctgtggaatgtggattacggtatgaaacgtggagtagctgggatggggttttacagtggcatcctgcgttccgtgcaggtatttcaattcgttgcagagcgagtgcttccctgcatgcttcctctcggatgtaaacatggttatctctgcgcctactgggagtggcaaaaccgtgctgttcgagctctgcattctaaggcttctctcaaggttcctctcatcagagtggaggtttaatttgatcaaaggaaccctgaaaacagtatgtgtcaagtaccttcttagcttttctatacactttagggattcactttgtatgttgaggatacgaatgtctaatttttaccatgtgcttaatttgaactgcctggtagatctatattgctccaatgaaggcgttggtgcaggagaagttgcgtgactggaacatgaagctgggctcgttggggatcagttgcttggagatgactggtgacaatgaattctataacaccaaatccatacatgatgctgacttaattctcacaactcctgaggtatatgtgactgcttgctttgctttacacggtgtaaaaagaggattggcacaactgctagccacttccttgttttttaaccaacatctttatgtttgcagaagtttgattctgtgagtcgtcatggaataagagatggtggactgggtttcttcagtgacattgctctggtccttattgatgaagttcatctcctcaacgatcctcgtggagctgccctagaagcaattgtcagtagaataaaaatgctttctcgacttggcacaatgaagattgctcctttggcaaatgttcgattcatagcagtttctgccactatccctaatattgaggatataggttggtaaactccaagcagtatggtcccaacatgtctctattttatttacattaccagattatgttctgttaaagattacttacgttttggctttgcttggatctcagcggagtggcttgcagtaccgtctgaaggaataaaaaggtgatgagaagcaacttcatcaaggataccaccactagaacttccttatctatatattccttttgcagatttggagaagagatgaggccagtgaagttgacaaccaaggtttttggtatggttcttgtttctcatcatattgcaaatatttggccaaagcgtaagaattaggacatttgatttacttattatgtcaaagtgagaagaaactgtgtcatgaatacctccatcctacacctgcaacttcctcacagaatcagtcatgaaatgatgttcgaatagatcattatttttgttttactccacaaaatcatgaactcttgaaaatgccactttgattacttagcatgtcctgacagccttacaacacttaaaccagcaatttatatgtttgacctaatctatatctgtttcactgtgctatttaggttatgctccagcaagaaatgacttcctgtttgagagggtatgcattttcttactatctgagaatgttccttctttaaaatgagaagggacaattagggcgtgtgctaagtcagatgtcttcttcatctccttgagctgtactactgtactgataatttgtgcataatcactgaatcgaatctgatatatttattttctttatttctttctacttgtagagactccaaagtttcattttcggtaagttacatctacctatctgtcaattgtactttaagttaagttagcagaatttcaggattcaaaataaaggataatattgatacagatatactgatgcaacattcaagaggaaagtctgcacttgttttctgttctactagaaaaggcgcacaagaagcagcacagtgcctttcacaaactgcgagttctctaggctattcaaatccatttatgaaatcgatgcagcagtatgaacatctaaaggaggctgcactaacctgtagcgacaagcagttgcaggcttgtctcgtacatggaggtcatgttgaatcttgttctcgacccacgataccttcacaacctacaatggtttcccatgttttgatgtgttgcctaacattacactgattggtgatgcatatcttatttcaacttttcagttggttatcacaacggtggtctttgcctaaaggataggagtgtcgttgagggacttttcctgaagggtgatattcaaattctttgcacgacgaatactttggcacatgggatcaacttacctgctcacacagtggtgataaagtcaacacaatttttgtgagttcattttaaatattcagtgattgagttagcctctatcatcttaatgatttttctctgatattcattctatttttcagcaacaaagagaagggtctgtatgtagaatatgagagatccatggttcttcaggtatacatactatcatgtctcatttccaccagtaaatacatcattgttgatatgcaataatattattcagttttgcttcatgaaagtatatgtgattttgttatctttgatgtgtagtcttaatgctactccctctgttccatattgtaaggtgtttcagtttgccctaagctaaacttctctaacttagaccaaatttatagaaaaatgcacccacatctataatatcaaaatagttgaattaaattcaccataaattatgtcttgataatgtatttatttggtattgtagatgttaaatatttttctataaacttggttaagtttatcggaaccaacatatacgctgtaaagtgcatgagaacataatctatcatgacctttcactctatacttatacaataactttttgcttgggcgggtgttatgttaagttggttatgacatacttattgccaaaagtttattattggaatagttatttatgaaaaaagaggtatatcagatgttctaaatttcatgctgcatataagttcaattgtttatcataaagcaaagttgattctgacatacttattgccacaacatcatatcgtttgatccttttctttgacgaaaacacatcatttgatcttatatctgcaaaacacttgaaattggacgtgcaaatttcatgccacatactagttcaattatttatagtgtaatgtgtaagatcatatttttttaattaaaactaacatgcatttaaagcattgtagttcagagcattttgtgattcaattataaaattatactatatggtttcctcttgcttctaacaatgcccctccccttatttgggtgatctacagatgtgtggaagggctgggcgtccaccatttgatgatactggaacaattataatcatgacaagaagagagacagtaaaggatctatattttccactcttgttaactctgagatattttgataccattattgggcaaaattggctctataggtcttttgtgctaacctgttatatcttgtaggtgcatctatatgagaaccttctaaatggatgtgagatggtggagtctcagtaagtgttttatgttcaactgaaaactaataatttcacctagttgactttgacatggactgcataccatttcaaacttctcgctgagtatagatgctatgaccaggttacttccatgtgcggttgagcatctaaatgcagagattgttcagctgacggtgtctgatataactttggctattgagtggctcaagtgctcgtatttgtacatcaggataaagaaggcatgggcaaattagtattattaaatctttaaatccatttcgcttaaatgcataaactgactttgacgaattgaattaccagaatcctcagcattacggaattaagaaagaaattccacgtgaacttcttgaaaagcaaatgaaaggtatatctttcttggattttgtagaattcatggttctatgggattttgatcgttatgaactcaatttacagatatatgtgttgagaagatccatgagctgggggagtatggtctaatttggacagatgaagatggtttccttctaaaaccattaggtaaattttctattttttttattaaaaaaatgatgatacaaattaatacaggtctattggtacaagcttacgctatacaaattgaagtttagtcttttgccaattccacgcttctgcaaaatagtttggctttagttggaaaacggtgtgtcctcactttgtggtacgccttgtgtgtttcccatctgcacacctacctacattgtggaaagtaggcttttgatggtgtgcccactagcattgcttaatatctgtggcttttgtgcaattcagttttgaggagagaatagaagcactaccatctatagtatccaccaacctgatccatagcaaatctttctattaatttgggctaaatacattacagttgttcctttgaactggattcgttgtatagtgcatgtcaaagtgtccaaaggattcaattccgaaccacatcattgtatctaaaatacatttaggtaataggcctagatttgactggggatggaaaatgagcattacactatggacaacatgcatttcttcaacctgtttcaagtacggagtttgagcttatgattggtgtggtgttgaggttttccgagttccgacctcagcaaccttaacaactaacatagaccagtgcttcaatatctgagctgtaacattgacagctattcagctagctccaatacatgcttgaatatctggggtgcgatcgttcagtcttatagttcaagtagataacatgaaatatctgtgtacgttttctgatcatgaccttaacagctgacactaaaatgtacaccgtcttctccaaatttaatggggttcgtttttgtaagaagttctgctggcaaacatggcaggtcctttgacggctgggtattcaacttgaagcctacttctgtcccataacttcaatagttttgttactattcttctagtgtttctcgttctgtttgcccatctgttcaactcccttgctacttagatgtctcctcagcattccagttactcagttcatttgcatattaaagatgactcttctgagatatatattttctactcagaacctgggaggctgatgacaaaattctatctgaaatttgatactatgaagcttattgtcaaagcttctgcctgttgcactttggaagatctgttgcatatcatctgccactctgcagagattacttgtaggtaactccagtttattctaattaataattaaatataataaattagcgatttgattttttttctgtaatatcaagggatccaactacgacgaaatgagaagaagctccttaatgagataaatgctgacaaagagggaaggctttggttccatgttgttggtgcaaatgggaaaaggaagaagcgtattcaaacaagagaagaaaaaatatttattctggcaaatgattgtttaactggggaccctctagtccatgatctatctctcaaccaggtaatttgtttgtccagttcaaaataccatttgattttgtcacctattcttttgacatattttaatttttgcgatttgatgcaggaaatgaattcaatatgctcaaatggatgcagggttgccaaatgcatgagagaatattttatatacaaaaagaattacaagtctgccataagttctatgctccttgcgaaatgcttacaccaaaaactttgggagagtagtccatttttgctgaagcaattgcctggaattggaattgtcacagcaaaggttattaactttattatctttattgggtatgtaattatgtttatgtatctgcagtctgcataattaatgcttgaggttatcactgtcatcccaggcactgaagactgctggaattgattcttttgagagtttggcaactgctgatgctaggaagatagaatccgtaacaggacgaaattatccatttggagatagcataaaaagttatttgccatcattaggccccaaaattgatataaacatagaggatgctggaaacagacagggaaaatcaacaattattgtaacactgactcgcctatcacaggcagtaggatccagtaaacaaaattacgctgatatggtaccctctttaactttattttggatcaattgacactcttgaaacctaaatttttacatgattttttgtcaggttgtgggatcagaggaagataatgcgatcctctttcatgagaaaataaagtcagtggttttgttctctcagttgatatcctttacagtatattacctgtcctttgctgtctatttcctctcctgatatttgcttatctgtttttcttgtggtggttgctgcaccatttctaattcttctgtgaaggactcaagaattttccaggtaatatttctgttgttatttcagttaatgcttcaatccttctatagaaagttaaaagtaaatgatctttgattgagccgttaaaaataatgagaaaaagaaacagatttgtcatcagattcgtagtactaggaagtgtcacatccctccaaaatcccttatattatgggacagagggagtatttagctgcattctcagctcggacgtctaagttgtagctcagctgttcacaaatactcttaactggctaatttgaaaattgcagtccatactctgtcaaactgtatgtcccatgccccccaaatgccagggctactctgaaggttgacgtcatttttgaagaatatggtaatattaccattggggaactatagatcaaaaaatgaaattttcatctataatgtgtacgattttatgctgacatagtttatatctttaattttatgttcaagttggtcttgatatccacaagaagcatgtggtcagcagggaagattttcatgtgaccaaagtgtttgggattaaaaaggcagaacccttgtacaatctgcctgcagagagctgtttggttagctctaaaacaactcggacaaatcaatctaagtatcataatggacagaacccactttctaaagaggtatgtgttatagaagatgattttagggccaaagctccagacaaagatgataatgatctggaaattctgggaacaagagagtacaacaacttagcttcactgtaagtgcttaaccttctctacattgccaaggattccataatcagtgcagagaaaatagaacacctatccggtggctatcattctacacacagacttttttttttatttaattttctgcaaggattgcaatatgtcaccacagaattgcaatagatcacagctattagtgaaatttctaacatgtattcgtcatccttgtaattatttctttatttataaccattttttccgaaagttctctactatctgaatatagaatatagcgttctaacttctaaggtgatattttgatgactacagggaggccccaagctttactctactgcatgaagaagattatgaaggtaacacaattctatatgacactatgcacatctattgtgtttcatttgtgctcttgcatgaaaatttgtgttatcatgttcagatgttccagatgtattggcttctgaaccagtagaggcagaatgcaaaagtgccaccaacaacacaatttttgatcacatacgcaagaaatccagagatttccccaatctaatgttgtcgaaatccatggatagttcttatgaacctttgatactgaagaaaatgaagacatcgggcgatcagtttggactagatcagagcagtctgcatgcatatgaagtcacgcctatggtctttgatcgtactgaggctagagtctctccaaacaatacagatgagaggtgccgcaacatcctgaccagaactgcagaaactagatcctttcagtttacgggcaaaatggacagtatatctcagaagagcgagatcctgaacagaactcaaggcaaaaactctactcaacttgcgggtaaaaaagcatttgaaaagagcaagaccccagatgagaattcacttcactttgtaggtaaaagggacagctcgtctgagaaaagcaaggctctaagcaagactccagatgagaattctcttcagtttttaggtaaaatggacagctcatctgagaagagcaaattctgcttcagcagtcctcttgcagatttccagcctatgcaatgtacaaagcaagttgcagcctcagtccaacctctcacgattcaggattattgcaaggatattttggcgagtgcaaagagcagtgggactggcgcatcttttcttgacgttaagagtgtcttctcatttctctgacccacagtggcgatcttgtgcagcataccttgaaatgcccgaatatgtattgtaatatgccagatgcttagcgaaaaatcttcccgaggactaaggtttcagcttcgcataaatatgttcagcgcttcaaatgcctttctatatgtaatgcatagtgctttcactcgatgtgtttagtaaatcttgccctctatattttcctccagtatccagtactcccacggaacaaaatgggtaatggagaaaaaataagtgcatatgcctatgtgtggtacatgtacaagctgttattagctgcacaaactatgaagttttccatcgggtgccaagctaaatgtgtcacctttgatgtcatgttacatttagtgtcctcccggccgtcagatcttggtccatcttgacctgcaggggaagagaatttgcagagcacacgctaaaagcttcagttctaaagtagaggcgtcactgaaagaatgcacaaagacacattaaaagaataacttgatgaattattcgaaccttttctctggattccgcgagcaaaattgctgagcaacccttgactctttgcagaggggaatgattgtatcctgaattcttcaccgtattagatcagccttgctaaatttaagtcatttggcagcgtcaaagcgacagtaaaagaacaaagctaagtacctgtaagggttcgtgctagcttccaacgtagttccgttgggatttgcagcagcacgagagaaaattttgaatgtattgctgaacacaaagaaccacgagatggataaggatgggcactaacagtatagccttatactccagatatgaggttgatgtgttgcagcagtagaaacctgtaagatccagtggcgaagtagtccccgcccttgctggagcagcagctgaacctgtcgaaaatgcagtcgttgttgtacagctccgacagctgcaaaagaattcttaacttcttgtgttgttgtgttctgactgacacagctgaccgggcgatgtaagacagtgaaatgcttctgtgctggataaatgatgtaccttaggacgaaggaactcatgcaccttgtaagttgcaacaggggagctctccacgcgcaagtcccagagctgcaaatggcgaagttaactgaagttattcaggaacactgaaggtttcagtatccaaccatccatatgacacgctgcctgtacacttggacctttttagaagccatgtcaagtggaattcagaataccttcaggttcatgtagtctcgagttagcagatacttcccatctccggtgaacttcacatcggagatgcaagagatgatctcggtgaagagcgtcctaggctgcacgctgttcccacgatcctggaatctgaaaaacagtaacgaaccattttgcatttttcagagaaaaaaaaagaaaggtacaacatcagctaattaattagccagcctcttacattctgacgttgcggtcgcacagcgccgactgccgcaggtcgaccagccggacgaagcccctcgagctgccgaaggcgaggaggctgcacgacgacgggtggaactctgccgaagtgatcacctctgatcgaaaaaaaaaaaggcaacagttagtgttcaacccttcggtttcgccgttcattcatgacttcttttattatgcagttatatgcgggaagcttgagtggacgtccacccacttattgcatgttatttaaatgattataaaaaaaattaaaaaaaatatgaacaagatagatcaatatgtaatatatcaattcacaaacatgtaagttaaaattcaacttctacaaattataacaaaaataacaaacaaaactcaaattactgtatgtatatttacaattaaatttgttatttttgttacaacttatagaagttgaatttgaacttacatgtttgtggagtgatatattacatattgatctctcttgtcaatttttttgaaaattttccgtaaccatctagctgacatgcaataaacgggtggacgtccactcaaattattagaatccatctctatgtatatgcaaactgtttttgagcaaacaaatgaaactaaatcacctacgagatcctccatgtccgcgggcttcatgtccacgacgttgaagcactggtccgtcacctccaggtgccacaggttgatcctgaggtcgtcggccgacacgaacgtctccccgtcactgcacacatgaaaaagagaacaaatctacattatgacctcgttaattctcagagttgagacagaatggcatgacacaggttgtaaacttgtactgtaatagctggatcaaccaacctaccagttgttcgaaatggagttgatgttgtacacatgagcacgggcgaacactctccggcacttcgcggtatatccttctccaacctcacttgcctgatcacacatggttacacaaaaggcacaattcaaacgagttcaaccgaagattccaatgctgcagatagaacattaccttttcggaatgttcagccgaatcaggggacaaatagttcctagctttcttgctcgcccactcgtaataatacccatttcttacgctcgaatcaccctccccgagcagcgcgatctcggacagcgacgccgaagtcggagtgctccgccgccgccgcggctggccgttccctttcctcgacctgtgttcggagacctgccttgaagctataaaatcattacattctagctactaatcctacagaaaagaagagcttgaactatcaacaaggtgatctcaatgccgtgttcgatcgatacatataccttccagagcttgacggtgcggtcgttggtggcgagcatggacagcgacgagctgttcggccgcgcgcaccatctcagcttcttcaccttctcgccgatctccaagctgtgcagaacgtcgaactgtgtactgcctactgatcagtaagagtgtactacgatttgcaaatgtcgtaagccgtctcgatcgatgggtgactcgctcacctcctgctcgtggctctggaactccgccatgtaggcgtacgccggcggcgccgccgcggcgtagtccgtgcgctccaggtcggcgcgagacggcggcggcggcggctgcggggcacaagaatcgctggtcaacagcccggctcgtgctgcagggaaccatactggaatagctagctttgagatatattgctgtaatttacgtggctctcgtcgtcggttcttcggaagaggatgacgcgcccggcgtggtcgccggcggccaggtgctcgccccggccgtcgaactcgattgccgagatcgtatcacctgaaaaagaaccggattattatcctcgctcagacgagaggccaaaatccctgatggctttcgacatagcgtgagagttacacgtaccgtcatcttggagcgtgccgttgtcgtggccttcgccggcggcggcgagcggcagttcgccgagcacctgggagaacttccagctgggaagctgggacggcggcgcctgagcttcccgggcgccggaagggaaagaagaggaggaaacgggggagggagctatggaggtcaggctcctcctcctcctgccggcgttgctcatcgccgcgacccgcgaggagctccttcgtcgcaacgtatcatgtgtgggcgtcggcgcgtcgcgctattcggcgctggccgggcaagctcagtgctagtcagtctatcacctcatctttggttcgtttttttggttcatttcttggcgattatcagaggcggcctcggagccacaggcctcgtcgttgtgggacctggtggcagaaaaggccacaattttgcgtccagttctgtacttctgtatgtacaattcacacttcgcaccacacaacaatgaatgaaatgaagatatcccaactcccaagaagctgctgctcagagattctcatggtagaagtaactgtattaaagaatgaaatgaattatatgggattacgagtggagagaaatatgaatgctactgttacggttagtttcaacgatgaataagaaacagcgtggcaaaaatacaagtgtacaactgctgcaaaagagattcagataccaagtgatgcgtaatgtttgggcgtttgtgagttgcagggcaaaactactaacgacagccacacaattttggtagcactctgacaaaagtcgagggagccgcagtattatttctcatgttcctcaagtcgatgaattagctgctacacatttacaagcgtctatttctgtaggcctatagagaagacattagccccatcaaaatggctactaatctagcaatgagaagaccggaattccctttgcattgaaacttgagcatttcacaagtagttcttctccgacctcaaaatccttgtgtccattttcctgcaaaggtttcaatgtcagtgcaatgaaattaaaatacataaataatgatactacattgttatgtttagctaagtttttgttattgagggcaatggatccatccgatctgatattgcattgtcatgttcaatactgcaaatatggaaacataatttctttcctaactatcaaagatgttatatgtatgcgatagtcatatagcagttctttttcatataatagaaggacaaaaaggacaagcaatgtgatattaatattgcaaatcccgaagcaaattaacttgctcactagagagtttaggtatgaaattaccgcaaatttatgcattccacgaactccatcactcaactcaagtactaatccataggctcgtatctggtagacctttgctgtaactacgtcacccagcttcatagacccagacctgaagtttgagggactagaatagttcatgatgttacttttattttgttctggaatggcatccagcacatcatttgaagagtcagctttttctttcttatttttcttggccgttgttgatgcacctgaagttttcttagcactagttctcttaacttcctgcctttcgctggctggtttagatagcttaggagatgactttgcaacctttgggcgtttcttcttaggatcatttgtaacatcttgcgcatcacattcagcagcacttcgaattataactgcaggagtagaacacccaggtgtctcctcaatcatgttgtcttcgtctttgctgatggatggttcagcattagcatccttgctaggcatgttctctacagccgtccagccaacaacttcttgacttggcaaaggatcagtatgattacttgctaaatccttcttttcatgggcatggggcagggtagctttaagagaaagtttaatgttacccctcaagtcctgtccaatgcatgtcaatgagagcacttggccaacagatacaacatccgagaccttagacacctgcaggtagaagggaaataaaatgagcactaaatacatatataataaatacaactgattaaaagctggttaatcagcattttagccagtatgaatgcaatgaactaatggatcacttatactgtgaaacgtgattgaacctcttcttgttgctcaagtgtgtttggttagaacaatagtctcatatcacatgggtgacttcatgagattgctctatgtttcctatggcttaatctcattggccatcatctactgtaaggtggatgatggatcaacactcatccatggaactattcctcacatcctctatcatgactacaacaatgtggagggggaagatgatgataatgatcattcatgattctcattcttcaaaccatacaataaatcaagaatgataagtttggagctaagaatcaaatgaccctagaacatcgattcctcaaacccaacaaccctttaacaaacaaaaaaaaagtgtataggaacttttatcatcaataacattggtatcatgttcagttggaactgcaatcatgtactggcacaaatttgaacaagattagcatagtaaataaaacacatgataatagacagtatgttccatatattaatattacagagtttttaagagaaaaataccttatcatgtgacaactcagaaatatgaagtagaccttgctgtccaccattgaattccacaaaagcaccgtactcctttattgaggaaacaacacctttgtacgttctgccaacttcaatttcacgacccacaagaaattctacctgtaatgaggtagaaaagttagaaatttagaatggtctggggttcttcctcccaggcactttgtgttgtactcatatttcaaattttatagaacagaagatcatgaataaagtgcaagcaaagatcacagaccctttcataagcacaatgaataaatagcatattgttgtattgttgatacataccttctcgatagccttatccataattggttgggtttttgctacaatagtgactgtaccatcactaacagatacccgtgcaccttgagaatatggaagataagagttaaaactcagctgattgagaaaaatgtgaataaaacagagtgcattgtatgttcatgcattcaaatatgcaggttatcaaatacaaattagtgatgaaacatcatttttaacctcaagagaaactccattctcacacagactgtaaatttagaacctacataagcgaggtcaagaatagagaaataaaatatgaatgcttggtagcaaaatgaaactctaccaatattttatattcatattgtcgtgcaaaaaaaacaaactcctgaagttttgaaagatacaaacttgcaaccattcgatactaaattaagtgacattttgacccttacatatgtccatgggctattctttatgaagttctgatccttaaatatatccatatgatattctttcatcaaatcaatgtttttttttctaaaaaaaaaggtgccgttaagctctgcaaaacacttttttcaaacactgaaacaccaagtcatcaccaatccgcataaatttatgactttatggtacgacaatagccaggatttccactacgttgatctatcactctagtgaaatggcatgcatctttacttttaaagaagagggagttgggctactctacatcgtttgtggctacaaacatataggcatgtgtgcattttttgtaagatgtttacagaaaaaaatggcatatttgcacaagtatatgacaatatgtagatgtttgattagcatcatgtatcatgcatgcaacatctggatttagtataattatttcttttttgcataatatattttggactatagtatgttaaggattcgttgcaacgtgcagacatgatgctagttatttcttgaaagaagttgcacaggggcttgatacctgtttcttgctcaatttttttcctgtggaaaagcagtttcctaagagaatcactgctgaagctcagtgtagctgcaaatggagggcaattctggtgttgatcaagcaatgtttgcaccaaaaaagaactccttaaaagaactaaactataagtgcactaacaaacctaatcgaggagagctcccatcattaaaagcacgtgcagaacttatttcctggtccatacggtcaaggatttgatttcgagcctttcgtgcaggttccaaactttcacatattatgtccaacggtattccagcaggttttatatccagttgaatagcagtaatacctctccttgttcctgcaattttgaagtccatatcacccaagtgatcctcaagaccctgggaaacatcaatggccatgttcagttcagcaccaaccaaaatatacagttggatgaaaaaggaatagttatttataaggattgatggtagaaatggtatgcaactatacttactaaaatatccgttaatatgcgataactagaaatatctccagttgtctggtccacttcactgacaagaccaacagaaacaccagccacatgttcccttacaggtattccagcatccattaaagccatacttcctgttgccattcagatgaatgaagataaaaaaaaagaaatattaagaaacaaatcaatatttaagcactttgacactaaaaggagattcatatcaatactcagaagtagatcctaggaacacaaagaagttaacataacctaaaaaaattcaaaaatatttttcaggtctctgctaagagtctctgactactgatctaaaactttatcttctggacagtagatattatgaaggcaatggagaatggctagcttggattttctatagatgaaaaacatggatccgcattctattacaaatggttgcagtgtatagcctttcaaacaaaggcttctgcgaatgagagaatgagagaattagggccaattgctaccagataaaagatacataacgttttaaaaaaaataaaaaaggaaataacaggatctagttaccacatgatgcctcttaacaccaaaatggaaattatattagttcattttaactttgaagtatactaggacaataaaagagacaaatgaaatgtacctccacatactgatgccattgatgttgaaccatcagaagccatgacttctgaatttacccgaactgtatatggaaattcaccttctgggggaagcacagcgagcaatgctttctccgcaagtgtgcctgcaaagtgttacaaaataaatagctgtgcagctgacaaccattttgctttgcaaaattacaatgcaaaataagattggaatataagaagcagcatgtaaaggaagagctatcaatgactagtctagatataaaaccttgtcactagatggcattcagcaaattgcaacagccaaagtatcccaatacagaccaaatgcttaagctttaaaccagtcctccccaccagcagataaccactgcctctcccaaaaaaaccagtcctccccaccagctgataaccactgcctctcccaaaaaaaccaggcggttggttaactcaccagctgataaccactgcctctcccaaaaaaccaggcggttggttaacaaaaaaccagttggatctagtgctttatgctcgatccacaccctcagctcatctcccagtcgtatgggcccatgcaacccatctgtatgggcccatgcaatgggtaggcgtgttactagttaaactaacataacaccattacaaccactgcaaactcactgaggtcaagggggatgaccctcacttttgctaaatttctaatttattaagagaactactggtttttgccacctaactgtgaagtctgttacttgccaaggactcaactatctattgttcactggtcatttctccatttttcaacacactctcttactgagtacacgtacccattgccaaggactcaactatctattgttcactggtcctttctccatttttcaacacactctcttactgagtacacgtacccatgtgagactaatctcatcgtaccaataggccacaatccaaacatgaccttagttgtttgtctaatacttcagggtaattaactcactagttcctataatctgcacacaaacataaactagacaatgtaccatgtccaacttcacgtcgattcaagcccccacgtttcgcaacttcatttattgaaaatggtggaaagctgtagtgaagcatgaaacgctttgttggaggaccaacaattgaatccaatcgctgagcatcaccaggagcaccaagggtaactgtacataaaacctacaaataaagtagtccatgtgggtggtcactttactggaaaacaaatgttgcaatgttccttcaatttaaagtgtgtgcgagagaacctgtgtatccccacgtgaaaacagggcagatccatgcaatattggatatgtgctggattcacagtagagtggcctaacttcatcaagttgcctgccatcaactctaagtcctttctcgattattcttttgcgtataacctgcacaaaagatgggcacaaatccatgtcaactgaaataacagaagtgactctacataagaacataacactgaataaagtaatatcagatttttgtcaaggatagctagtacatctgggatctacaacaccaataaattatgtaggttgtgtaaatctaggcatatgaagcaaacgaaggctcaaaaggatgcatcaggactagaagtttgcttgtctcaatgcaaaaccggcatgctaagtttaaagtgctaaacaatgagatttgttatacactaatgtgttggatacataagttacagacttgccaaagtttataatttctgttaaatcataaagaaataaaagtgctctgctatttctgttagcatgaccaggtcattccaaacttgtaagtttcgatgcatttaaattggatgtgataaaatcattcaagcaggaaaactagatgtgataaaatcattcatgcagaagggcaaaaggtcgaataatgacatcagccatcgcgcattgcaaaatcaggatatatgttagctgtatatgtacaataataagttgaccgacatgcatgcatttgatgtccatcagttgccaaaaataggtttttccctccatttgcaaggctttaaccaaagcaattagtgtgcactacctgttttctcactgtatcaactgccttgtgaagaaacttcaagctgtcctcatcgcattcttcttcaagctttgctttcacagattgtgtaatattttccaaggcttctcctcgctcaaactgcagaaagaaaaatactcagtgagttcatgttgtaaagaaaaagtaaagtttgaaacatgttacattttgcttctcaaacaaaagacagggcatagaaaacaaatagtggtggcttgaattcatacaaaatggtcacaatcgagcattttatttcccctccacatattttttaaggaagagtacagataacatataatcaccttgccgtatgttgaatcagtgaagacttcttcaatgggtgcttctgataatgttctaattttctcataggatttatctgaaatcaatgagatcttgtactctttcttctttttgccagctctcttagctaatctaagttgtgggttgatgcatttaactgcctgagaatgtgaatcaattcatgaggatatacttacaatagagcaagaatatgaagataaaataatacctcagcgtgtgcaagtttcattcctgcttgaagatccctttcagtaatctcacgagcttgcacatctatcattaatgttttatcacgagaacacgcataaacaaggttgaggtcactcaaacctaactgcaaaacacagttaaagtaaagtaaatacaacatgagacagctgaaaaaaaattctagcaatgtagaccacatttgaatcatatatgctgatggagttggtcgtgctacacaaaaagaccaaagagaatcaaataattgtatgcatctccgtaactggaccagtgcaatgaccaatatcaatactcctgagatacatcgcatccacagacagtacatttcacaacaccatgggaacaatttatggaggacagatcagtgcaattccatgtggtactaatcgatcagtatatacctcatccaccgttgggttcagcacaaaatttccatcaattcttcctacacgaattactccaattggtccattccaaggtatatccgatagcattaatgcagctgaagaggcatttgcagccatcacatctgggtcttgttttccatccgacgatataacatttaccatgatctagaaaagcaggatgttgctaggtaaataagttaaggattttacaaaaactttacacatgttaagaaccaaataatagtagcattcattacctggacttcatggtaaaatccaggaggaaacaatggtcgtattggtcgatcgattatacgcccacatagaagctccctttccttaggggcaccttccctccgcatatatgttgtcggaataacaccttgggcatattgtttctcttgataatcaacctgcatcatgaataataaacaaaatatctattagggcagagaacaaaatggagctaaaaagatgcacaaaatacaagacaagtgatgtctttaaaatgtgagcacgtcaatatttgttttcaatattgaattcgtcatttcctcaaataagttaaataaatggaagttgtcgatgggtatcagcagctgtaagaaaggcccaagaacaaccaaagcttctcttttgcatcccacctcaaactaaacacccttcaaaccaacggcgaggattacaaatggcatttagcatcagattttgacttccgcagtctcttagtgatacaaaattgattctagacagagcgatcattagccaaattaactatataatactgcaaatcaaaacctgctagtgaaagtttcccaatcaaattcaacgctctctaaaactccataacacggtaaccaggttggaaaatggggatccgtacagtcagtgggaggaagtcccggacgggttcggaggacttggcggcggcgacggtggagaggacatgggtgtcgtccatggagatcacgacggagccgttggcgaagcgggccatcttcccggtctcgaaggagatgacgcgcccaccgatctcgaactcctcgcggaagctctccagcaccttccgtcccggcggcggcggcggcggcgcgtccgcctgcgcgacctcctcggccgcgccggagaggaacgccgcgcggcctcccgggacggagagcggcgcggggaagcgggcgcggcggcggccgccgcgcgcgaggaggcggagggaggccaccgccatcgacatggtggccgcgcgccggtggaggggaggaggaggagaggggttttggtttagggtttaagcgaggcgaaggcgaaacggctgggccttggttttttcacaccgtatctatgggcccacgtatcagcgggagaatcggccacatcttctccagcgcgccacctccccgcgatctggaccgtacatggaatgatcgacggctgggaatggtcatggcgtgtcaaaacgcagaacccaccgccgcttcggcgcagtagagggcgaggcgacgcctcccgggccccggcggcggtgagctccttctcatgacccaggcggtcgccgtgggccgtggcccaaggttggtgatgaacgcttttcttttttgagagttcgtaatggatcgccttccagacgagttcttgaattgaattcagtttttgcgctaagattgcctgctaaggcagttaaaaagttatttggatcaagcgctcagtcataactcggcggtgtgtggacagaacagattgtctgatgaaccatgagttcctttcgacacttaaggctgttgttggcccgatctttcggtgagttgtgataactacgatttgggagaaacgttgacgattcgactacaaccgtacgagacgttgtgttgcgccttagcgatcaatacacctctccgtggtttgttgatcttgccggtgcaaatcaaccttattcctgcaagcaaatcgaagaaacaagcaagaacaagataaaagcaatctgaattgtaaataggagttaaatacgaatgataagttggggttccgaagaacaagcagacggacggtctagccgacacgcgcgctgcaagcaagtagcaatggctaaactttaatctatcaaaacccaataaactgtaaaggggtacctgactatttaaggaggtgggaggacgacctaaggggaccctagggtcgtgctccacctggttggggcgcaccccacatgggccccacttgggccggggtcccagacgaagttacaagcccataggcccattataggtgacgcagcaccttcttttttgatttcgcccgactgggatggaatttggcgatgaagctggatccattggaaagatgactccgagagctttccatcaagtactcatggacccaaaatggagctcgcatgcatatttggcggccgtttgaagtcgacactgtagcaggtggccgaactggattgcagaacttggacagcttgatcttgatgtgaacgacggttgtatctatagtagccatggtcacatcatcctccccttcttcacggaaaaccgtcctcggtttttccatatggtgctcttcgtgtagtccatttaaaactacctgtttcttccaatcacaacaagacaaactcgagataattttgttagcaataacatttctctctagattgcatgttttatccacatgtacaggaggttctaaatctgaacagatgtaaactctatgcaccaaatatattcctctatcattatattcaccaaagagatgaaaaatagcgttacttggacatggaaaatcaaacttagcaaataatttctccttcaaattatcgagctcatgaaaatcagcaaactgaacatagcccaaagtatttaaagaagatgtcaattaacgttcctctactctattagcaatgtgaacaacatgcttaaaatcagcgcagttagtattaacaacaggaatagcatgtccattcactagttgtggcatggatataagtgaagcattatcgcacaactcttctttatcacaaggaacagcaagtaaatcaacttgtgacaaaggcaactcagcaattgattccactaatggttgctctactatagcatgaaaagtggacaagtgtagctcaccttgagaatactcaccttcatttctctcagcaccatttaatttaccttgcgaactttcttcagacttcgcaggtgcttcatcctctttcttctcaagtataccattctccttttcttggatgtgctaatcttcctgcaaaacgttagtaacaggggagacaaaagattgctcctccaatgtttgcacatcatcattacataagtatattggggattcagaaataggagataaatcacattggtcatgcatcctcgcctttgatatgatctgactctcaatgctacgagcaagcatgaataggtgtccaatatgattatatgtcacattatcaagcaaaacctgaatttcagaattaagcccattgaaaaatctacgcattgtattttcattgcactctttgtgatcactgtagatgatacaaaccttaaattcatgaatgtactccctaacagttctgtcaccttgtttcagatgttctaatttctcccgaagagtacatttgtaataagatgtcacaaagcgttttctcatcatggttttcaatccatcccaagtttcaggtttattactaacataagtccaccaaaataatgcagaagaggtaaacttattactagcagccttaatcatttgagcatcagaaaaatcatatatatcaaattcattgtctactactagctcccaatcaatgtatgcaacagaatcatacttcccatcatagaatggtaacttagatgcaacttgttcaaaattatagtcatgtacctcatatgcatcacatggagaagtcgtcatatctcgtcgaaggtgtagaagtcgatgttctcgtattcccttacacaatcctaccatggttagtagcaaacaagaaacacacaaaaatatgcacgctcctatcaactactaggtagtggcagctcaaatatcacacacactcaagcttttaaccaagctcttacaagttcttactaaagcaagcggaatggtgatgtacaccgacttaaccaagcaccccaatggaggttggatgtatcgatgccttggcaaacacttgctgtacggctgcaatcagatctgtggagctctgggtaggcttaaatatgtagcaaagggatagcaaatgctcaaatgagagaatgcaaagttgaataatggttcaaagtcaagtaccgtgctggtcctaggctagaacgtactagagacgcgagcctagacacaaacgataccacaaaatagcactaggaacaactcatgcacaactctgatatatgaagttcagctaactcataacagtattttctcttttctttctttcttctttcttctttttcttttttttctttccttttctttttctttttttttgtgcggctttttttcttttttttatgcacctttctgcctttttttctcacttttttcttgatttttttaacaaaaactgactcaaggaccttaatgtaaggttacagggactcaaacgtaaatataaaatttacagggactcaaatgtaaaagtctaaacccaaaattaaaattatacaaaaatggaatgctctgaatttatgccggttccgtttttccaaacagatctcgaaaccgacaccaaacaaaaaattcaccaaggtgtatgggatggcacggtgtagattgaaccaaaaggaaaggagagggagtcggactcaaggggggaatgccgcatggaaggtggtgggactcggtgagaaatctaaaagaaggaaaccgattccttttctgcgtggcccccaaatagaaacgaaagcaatctaatctagtctaatattctccttctatcttcctcatgcgcatcttctgcttccttcttcttcacgcgcacatgcacggcaaaaacaaacacacacaaggatcggcaaactctagatgcaactcaagaactcaaaactaaccgacagaaacttctgaaaactacaaaaatagaaccgtggcagcgagccgattccgttttcgtaggtcccgacaacaacagagacacggtggcagcgacgactgtggtacaaaacgtgaccagaactcgaaactctaaacgaactagacgctaagaccagcaacacgacgtgacgatgcaacacaaaattcaacaaagtaaaaactgaaaagaacaatgcaatggcacaatatggctaggtaaatgatacaaatttttttgtatggctattttctagttataggaagataaaaactcaccgagcaacgaaagctctgataccacttgatgaaccctgagttcttttcgacactcaaggctgttgttggctcgatctttcggtgagttgtgataactacgatttgggagaaacgttaacgatccgactacaaccgtacgagacgttgtgttgcgccttagcgatcgatacacctctccgtgggttgttgatcttgccggtgcaaatcaaccttattcctgcaagcaaatcgaagaaacaagctgacggagctcgaggctcctcaccgggagaccgcgcaggcccccctttgccggttcggccgggggcttagggtgcaatctcaagctctctctcaaaaatttaactgtatgtggaaagattactccccggcaagacacacgagacacggcgatgtatacaggttcgggccgctgcgaagcgtaataccctactcctgtgtttttgtggatttgtgtatgaatgagctacaaagtgtgagcccacttctcccccgctctaagctctaaatctggccagaatcaaccccttctctatgggcaaggtcctccttttatacttcaaggggataccacatgcacccttccctttccaaactggactgttctttttttctttaatgggcggagattggtatggttgtcgtccaaatgacacttcgatgggacaactcacacctacctccactcccggcggagacgggcgcaacgtgagatcgtggctgcccgttgctgatgcgaccagtgtcagaccggtcattcttgtccaccacgcgtcagtttaacaacgtgcacgtttgccctttttcgtgtaacaccttgcctgtaatggttaggatgaagcctggtataaatctaaccagggctaacgtgccatctctaagaaataacacgcttgctccggcttgagacgagtgcctagaggctttcgtcttgatgggatggggcaaggcgtgcgtcagaccgccagtcgccacctaacccttgatctgaccggtctgtgactggtcacagaccggataaaagagcgtgctgtactgcgttgcatgcagcgtgacacgcttgaccagactgcaataaatgctgttaggtgagcactgctgtgctcacttatcccatatatgtggcgcagacttccttaagggggtcggggtgcctcggccctcggggccggggcaagcgcaacccgaccccccctcgggggaaatcaggaggagggcggacacctcaccctcgggcccgacgtccccgaaggtgccaggccacgtgggcgattgtgtctgcctcaagcctctagtcatgatactcccggtcccatatcaccgacagtagcccccggcgttatgccagagcaatttcccttcccaagggaagcggtcaggtgtgacgccacccctaaagcctggtgacaggtgggaccggtctccgtagttgggcaaaatacccaacggtctcaatccatgcacattggtaatggtgagttggctgtccataatgggcggtctcttcaagactgccacattacctgagcagcgcacgaatctgggcgagccgatttgcttcgcctggagatatggtgatggtgcttttctcggagccatcagaatagcgtatagcatcttctgggcccgagggtatcgggttttggcgtcccggagggcctcactaacaaagtagacgggccgctgcacctttcggcggggccgatcctcttcgctaggggccgcatctccagggcgctcttcatccgagaggcagcgcggggcgccctcggcttctgcgccgatatcctcggggtaagagggcgacaggcgcggccttcccgcagtggccccgaggctatcctgagggtcgggggcgcctgacaccgtcggacaagcaggcggagggccaactccggccgtcgggggccttgggccgccgttcggcttgggggcctctcggaccctgacttctccccgtgggcagcgctggaagagttccctttcggaaccgaggacggcgcacgcgcgcaggtccgggacgccgccgaccacatcgttcacagcttcgagggtacggcccctcggctcgcgttcgccctcgactccgacgaggagggcggcgacggtggtgcggacgataacgacgacaaggctggtgacccgggcgcgtcggagtgagcccccaggcccctgccaatcttgaatagctttttctttcttcttccgaggccttcgggcccccttcttgtatagactaatttaatctgcaaccaaataaagaggaaatttctatgtcaattctatttgttgtgtgtatgagacgaggatggtctgtgccgcggtccttctgtgtcttggcttgatcaagggctcgtgcccaggtcctagtcctcaaatggctcgggtcggggctagtgcctggggagatccacatgtcgagactggccaggccgggaacgtggtgaccgagggttatgggtgacccgattgtgggtttttgccgattcccccccggagttcaccacgccccggggcacggctcggttctgggccccgtttggcgattttagctgaccgaaccgagcccccgagggcaaggttgagcacgagtgacctatttcaagtcaagattcttcaaaaaggaaacaaaagcacagacacagcctttaggaaatcgaaaatgcttttgttgaaatacggaagagaaaaaagataagcccccggccaaccctgcacgcccgggggggtgcggggttggcccgagcccgaaacctgacacccgacccccactaggggtagaagcgacgaaggtgtttgatgttccacgggttaggcagctctgtgccgtcgcccgtggccagccgaacggagcccggccgggggacgccgatcactcgatacggaccctcccacattggtgagagtttgctcagtccagcacgcgtttggacgcggcgtaggacgaggtcgtcgacgcagagtgatcgggcccggacgtggcgctgatggtagcgccgcaggctctgctggtagcgcgcggctcggagggccgcgcgccgccttcgctcttccaagtagtcgaggtcaaggagcgccggccttctttctgtcgctcgcagacctcccctttcgggtggccagcgaaacgccctcgactgcgaggacatgaccctcgtcgtcggaatgggccgacctcttcttcctcctcctgtcccgccgccctgtctgagcggcggattcgggggcggccgaagctgccactccggaaccggaggagttccatgtccacgcttcctctttacgagccactcggtccgcgagctgaaaaagctctgcggtagtctggggctctttggaggcaatcttttcgagcatgcggttgtgccgcacaccccccctgaacgcgtagatcaccgcgtgtgcagggatgcatggtatagtattgcggacttggcaaaaccgctgaatgtacgagcgaagcgactcatcatcgcctcgctgtactgcatgcaagtccgcttcttcgcctgggcgcggatatgtgccttggaagttcatggtgaactgttggcacaaatcttcccaggagtggaccgacgcgggtggcaggttcattagccaaccccgcgcctgtccttttagggccatgggaaagaagttcgccatgaccctgtcgtcacccccagcggcctcgatcccggtcgtatagacctggagaaactcggtggggttgacgctcccatcgtacttctcggtgatggtgggccggaaccttgggggccaacggacattccgaagactcgccacaaaggctctacagccaacaccaccggccgggggcacggagggctgatcttcacgtccgtgtcgaggtgacactctggacgaggaggcgccctccgttgcatggggagtacgccggccattacgccggcgcccggtgttgaggcgggcatccggctccccatgctgatcctcccgagtcgacggtgtagacgagggagtggcagccgaatggcgtgcagccgccgccgctcgccgcgccctccgccttgatgacacggagccggtggtagcggcgccggaggtcttggtggtggcggaccgtccaccagcacccaggcgctgctgtgccgtcatgaccaagttggccacgtcatccagccatcgctgggctggagactccgggtcagggacgacaggcgggtgacgtaagagcgcgccaacagcctgaagcgcgccttgaggcgtgctgccgtcgccgtagacgaggaggcgacgctccccatctcgccgttctcctgcaccacccgcgactggtgatgctgcggatttctcgactctatcgagcgcctccccctgcttgggactttggcgtggaggaggtgggggagtgcgagctcggcggcgcggatttggctccccgtcatcgccgctcacactcggagagagatcgtgcgcctttgcttgctcggccattgggctgaacaagggaaacttggcgcacacggaagagtatgagagctcagaaaacacacgctgagccccctacctggcgcgccagatgacggagctcgaggctcctcaccgggagaccgcgcaggcccccctttgccggttcggccgggggcttagggtgcaatctcaagctctctctcaaaaatttaactgtatgtggaaagattactccccggcaagacacacgagacacggcgatgtatacaggttcgggccgctgcgaagcgtaataccctactcctgtgtttttgtggatttgtgtatgaatgagctacaaagtgtgagcccacttctcccccgctctaagctctaaatctggccagaatcaaccccttctctatgggcaaggtcctccttttatacttcaaggggataccacatgcacccttccctttccaaactggactgttctttttttctttaatgggcggagattggtatggttgtcgtccaaatgacacttcgatgggacaactcacacctacctccactcccggcggagacgggcgcaacgtgagatcgtggctgcccgttgctgatgcgaccagtgtcagaccggtcattcttgtccaccacgcgtcagtttaacaacgtgcacgtttgccctttttcgtgtaacaccttgcctgtaatggttaggatgaagcctggtataaatctaaccagggctaacgtgccatctctaagaaataacacgcttgctccggcttgagacgagtgcctagaggctttcgtcttgatgggatggggcaaggcgtgcgtcagaccgccagtcgccacctaacccttgatctgaccggtctgtgactggtcacagaccggataaaagagcgtgctgtactgcgttgcatgcagcgtgacacgcttgaccagactgcaataaatgctgttaggtgagcactgctgtgctcacttatcccatatatgtggcgcagacttccttaagggggtcggggtgcctcggccctcggggccggggcaagcgcaacccgaccccccctcgggggaaatcaggaggagggcggacacctcaccctcgggcccgacgtccccgaaggtgccaggccacgtgggcgattgtgtctgcctcaagcctctagtcatgatactcccggtcccatatcaccgacacaagcaataacaagataaaagtaatctgaattgcaaataagaattaaatacgaatgataagttggggttccgaagaacaagcagacggacggtctagccgacacgcgcgctgcaagcaagtagcaatggctaaactttaatctatcaaaacccaataaactgtaaaggggtacctaactatttaaggaggtgggaggacgacctaaggggaccctagggtcgtgctccacctggttggggcgcaccccacatgggccccacttgggccggggtcccagacgaagttacaagcccataggcccattataggtgacgcaacaccttctctttgtgatttcgcccgactgggatggaatttggcgatgaagctggatccattggaaagatgactccgagagctttccatcaagtactcatggacctaaaatggagctcgcatgcatatttggcggccgtttgaagtcgacactgtagcaggtgaccgaactggattgcagaacttggacagcttgatcttgatgtgaacgacggttgtatctatagtagtcatggtcacatcattgtcctttgtgatcagccatgtactacctctgaagaatgttctgcgcagttctgttgttcgatagtatttgctccgaaattaactattccttgcaaattggttgtgtttgaatttgaagctaaactgactaggctttgttcattgtcctgttggcatttctggaaccattttgcagagagtttaattactcgtgcgcatctaatgtgggaaccgtgggcataattatttgagatccattgcatttgcagatctgtagttcataagcagatatgctagtagtatctacattgtattgtaggcgccaacaaaatataggcatcactaaatcacagtcagaataaaatggatttgccaggataaagtagcgtgtgcaaataagcaaattataaacaggaatcttgataataatatcttggcagcaagccttaataaatcacaatggtaacctttgtaaacttttatcttactgtgccgtagtatggaactgttcactgcatagacaataggcccatctgttgggctaataagctagagcaaaagccaaaatttgaatttttaaacttaattttgaagttgatttaagatatacttaacttagtttctttttcagcattggtttttaagtcgctaagaataaatatataaaatttttatctataaattaatttttatttcctaataagtggcttattagggaatatagtcaaccaagaagacttataaatttgtcaggtagttactcagactttgtggtaatcaaattgcagtctgaattgttgtttctacttgggctttctgataatgccaagtctgaaatttgtagtacccagttaatttgcatagctacgtatctactcctctactgcaaaagttgctaatgtggtgacttcgaggttttgtttccagttgcctacttgatcataggtacttttcagcattcaattgttctcatccctgattttttttttaatatctgttctagaggaacttgtataatttgcaatacgtaattcaaagtattatatgaagcaccaattcacagtcaaaattagtatatgaggaaaatccacttatctgaaacactggccacttcattttttggtacaaatactagttcaccgatcatttgggtccaaagcaaaaccaaagggattaaatattctattattctgtggcttgatagtaccgcagcatgtaacgatgatgagaatggttgttgctgtgagtcggagaattggctatcctatatactggtagagaaaaaatgatatatgctagaagatggtgtagaaaaagatgttcataactttactaatttcttgaatctctcaatactcctaattcaggagatcaatgggtttgtcatgttggataaatttgtccagtcctgtaaaagagtcatcctaccatttattttgtcattcttgattttttttgtcatatttagctcatgggtttattgtgttctctttgaattgtgtcccctgcagtttgaatttggtcatttgtttttgctgggatcaagcctctcaaaaagggataaattttaagtttaggctattagtactactcattactcaccctgagcatgctaggaagaaaacaaatcatttatttcttgtggggtaatcatgtcccttcagtgatgttagctttagactagtcttcactctacagattgacagcaatataaattgttgaaagcgaatggaagttggcaattgctttgtagattattgagagtgagacatttgttcttcattgagtggatttagtggagtagtggggtataacagcaatgctttctgatatcaaccctagaggagtcttgggtaaactgaacatggatcacatattcgcagcgctgattgacaacagaatatgtaatgaattggactctcttagtaaaaatatataatttaatatatgtcttttcttcttcgtttcttcttttgttgagtaaagcatctctactttttgttactccctgatgggtagacctaggcagcgttccagagggtgggagagtgagtttgtttgtttcgttttccgcgcgcacgtttctcaaactactaaacggtgtgttttttgtaaaaaatttatataggaaagttgctttaaaaaatcatattaatccatttttgaaatttaaaatagttgatactcaattaatcatgagctaatagctcacctcgttttgcgtatcttcccaatctactcaatccccttctcctcaaacacacccctagaatcctttgccatgaactttgcacttattctttagaagcatgatgttttagtactactttacctccttttcaggccatcgtttctgaaggttatagttcatccataggtcaaggctggacaggatttaatttttttcatagcaacatgttttggtttgtacaaacaaaaaatcattcagtacacacggacacacagctagaggtggagactatcagtccaaagactagtgatgcgtgcacatattgatgctttctctgttggtcatggtctcatggatgacgcgtaaggtcgaaaggaccctgtaagacgttagtgcttctcatcagggagtgagggtagtgtgcatgatggcaatgattgggtgcactcgcaagaggaattttcacttcccctcttgctcacccacctgtacaaaaaaagagaggaaaagggagattgtttgggagggtctaggccgtgattagtttcaaagtttttcttcaaactttcaacttttctattacatcaaaactttcctatacacaaactttcaacttttccgtcacatcattccaatttcaaacaaactttcaattttgacgtgaactaaacacagctctaatgtagctggagtgctggacctggtgcccacaattggtggtgctgatttcctctcttttgtggtgggagcagtaacgcatgctgcatagatagtatattcccctgcccttaagcttagtttgtttgtaccaaatctggattactaagtcaatttacaaccttgttgccctcatagaattacatcgtcatgagtcagatgaagtgctgcaaaactttgtcagcatgagttagtggctgaacaggcaggctgcattgctccaaactccatatattatgaaaaatgcgcatctcgaaaaggaagattgcttctttagctttatataaaggatgccctcttctctttttatcgcggatctgtggatttggttgctcagtgaaagctgattagactctgtttgttggtaaacatctggttgggtttattgtcccaggttagtcgtgagatgcttaacttctaagtaattggttagctacatgcctacatgaatgtttgcttctgaacttttgccggcaagcatgactgttggtcagcagctgctaccaaaatggtaaaaattgacagatcaattgaggtatagaggttgtctaaacttttactaacatcgatgcctttggtactctaattggaggacagaaggtgttcgaatgtcccacttaaataggtaggagtgacagctctacaattatacctacatttagtaagtttgtttgggagccccagaagtaggataggaacgaagaatcgtcaacagatgaagtgtagtagaattgtcaacagatttaagtttagtagattgatgtttgaggcatgttcagtaaaataaacgtactgaacacagtaaactttgttttctacctttcattgtcattctttcccataaagcgcaccacactagcctctttaaaatgccaccgtgcaagttcttggctctctcactagtcccctagcttttgcctcatcaacagctgagcatttgcaacttcaatcaggtacggaaagacacctcatggcttcttggcctgtcttttttttttctcatgaagactcttgaattctctgcctccacagatcatggtgggtgcatggcaggagcatcttcatggttcttgagatcgggagcagcataagcagtatgaggatggagaagaatggctgtgctgttccttctcctcctccttctcaagaactcttcagtttgtccatgcctttcatggcataattccctggattccagaatctctgggtggcttagggaggtatgaacaaaccggcaagtcataaatcggcaatagtgagctccgactggatcttactcctcagtttatcaaatttagtttcattcccttgtaaccttattccagttgtttcaactttctattgttcccccttacaaaggtcattgcaattgtatcttgtggaagcagataagaagttgtctcggtgtaatcttgttttgtggagtcaaatgtttgcttgtgtgttgcttgggaatattttatccgagatgctcatatttaccttgaaagatagcattattgttatatcttcttttacatcaagttatttcctttcgttcgaaaaaaaaatgcataaagttatttgcacgaagagacaggattatgtgaggtcggtgttggaagtacttaaggctctgtagcttcagtcataaatttttttgcttctgatagaaagaatgggaagagcatgtatgtgttgaatacttgaatctacgaacgtctaagcatgtactgagactgaagcactgtaattgcatcttggttattcttgcaagctgatgctgccaaagtgcttcccgcatactgcaggctagtactagagcacagatttccggcagatgtccagaaaagcttccttggacatgaacatacagccaaaagaagtgcttgtaatgctggagacagatgctttactcagtacttttcttgggagcttttaagtgtccaggaaagatagcatccttgattgatcttgttcgacatatcaacgctgccatctttcacatatcaacgctgccatctttcttgttgttcgatttgcaatgaagaggcaggattgtgtgggtgggtattgcaaagtaagaatacgtgccattctgtttatcaatagctcggtcacaaatatgtgttgtttttctgatgaaaataataatagaacacatgtaattaatctacaaacatctaagcatatatgtattgaaaatcgctgtctctgaataccgaagcactgcaggtggtaccttgatccatcatacgtcctagtcattcttgcaagctgaaactgccaaagtacttactgtatactgctagagatagtactccttcgtttttttaatatatatcatcgttgactttttaaaatacatttgatcattcgtcttattaaaaaatatagtaattattatttattttattatgacttgatttatctttaaatgttctttaagcatgatttatttatatatatatatatatatatatatatatatatatatatatatatatatatatatatatatatatatatatatatatatatatatatatatttgtgtgaaaaaattgaataagacaaatggtacaatatttgataaaaaactaatagtgtcatatattaaagaaacggatgtagtatcatagtgctaccagagtacaaatttgcaacgtatgtctagaaaaagtgtcctaatgcatcaatattcagcccaaaaagggcttatgatgttaggggcaacctactccaaactttttactcggatctttaagtgttgagaaatgtttggaatacaattgtttgttccatgatacactattctgaattctctcaaagaatgtgcagttgcatacttacatgagggaagctgaacaagtgaacaacacattcatacagcttcaaatgaagaaaacatttggaacgaagcaaaactgccactagaggcggacccaggcccctaacaccctaggtcatggcctggggctggtgtcaaaagcccatgggccacaacaaattttcatcgtatataggttatcttactgttagagcaccacaggtcgccccaagccttagctataggctaggtccatgttgttgtaaccttgctcaggaacctgccacaacgtcagagttgtatgtgttctcaacaagacaaagcttttgccttaatgttgcattgggttatagtaatcctgttagatatagatcaaatggcaaatgttacactcgaatatagaatatataattgggaagttgaacaatgcttagcatcgggtgcccgacacacgcatggaagtatcggacgcaacgccattgcatgcaaggactgcgctcttagcctctcactctcaccgtgcgtccctccctctctccccatgtgcccctctctctatatacaccctctacacatgaatgcacaaaatcgactagtagtatctattaagttgtaaaacaatattttttactaatatatttatcaaatctacgatttaattgcaccatttattcgttgcaattaaattttgataacaatatttcgtatggttgcattccgataaaaacaatatacatgtttcacaccattaaaaatagatgtttcatgcgtgagaaacaaatgtttcaatttgtatttgactatgttgcacattcaacttttttttcagtatgtattttttaattcgttgcacgatgtattattaggatgtttcaataaatatgttctaatgttccactagttaatgtgtaaatgttgcacgtggtgttcttggtgtgtttcactcagtatcttacgatgttagtagttacaactatttttcttgtatggtataaaaatgtttcaattaggaatataatcatatatttgataaaaataatcatttgagattttgttttgaaaatttacttgtaaggagtataacaatgtaggagtaattagatagtatatataataaatagtttagtagaaaaatcaatttaaaatttatttatgttgcatgtcctccttcttgcatgcatggagtagaccatttattcataagagaaacaaagagatagacacgtagacaggaaagatgcatactttttgtatcgagtagtagtactagtctactgcatttagggcagtaacagtgtgccacacattttcgccgaacctcgcttgccaccaaggccaggaacggtattagctacatgctctacagtggaggtcactcatggtgggtccccccactctctctatttctctctctatccccctttacttttcactctgcttttcatcacatcgccttttctatcgcgtaggaaatgaggcgtcggcacggagcgttcccggcgatggactcggatccaagcggagctacggtggtgtttagggtggaaaataacatctgagatctcgtttgtttagagatacatatatgtgtgggcgtgccagtgtacctgaatacacaatgtaaacaaaacataggaaacatgctctttattaatcttaaaagatcataaatacaaattcccaatgtaatatatatgtatgcgcgctccataatctgtcattggacagatctgacttgtgcgatgtggtctcctggttcctggggcctcgagaagctcccagttaattacctccgcaggtctaggcctgcaagagaacctccgattaagctgcttgtggtcgtctcgtcgtcttcacttcgcattctccatgcatggttgtgatgatgatgtagatgtgtgtgtgtgtgtgtgagcgccggcagcgatccatggcctcgtcggtccgtgcgccagtgttggtcgcccaccctccgtcgtctagccttgtcggtcttgaacaacgtgtcgatgtagattgttggtgaagacatgcatggagttgcgtagcttgaacgacttgacgtcacagcagttgcgtcgagattagattagagaagaatcagggaggaattattgaagatggttgatgtagacggtggccggatttaatcaaagctcggcatctcatttgggacaaataagaaaaaccaacaggacttcttcagcccacgcattggtttgtgcatggcactgtagcagcgatgacatgtcgtcctccgattggttggccacgttgccacaataattaacttaatcaacatgcattagctagcttgttgccatccaacagcactggctcgccgtcctcccgtcgtccttcctctgtactgcagccatacttgcctccatcgtcatccgctggtttcgacgccatgcatgatgcttgacctccggcatgagaactgatagaagtcttggcagtcggcggcagctccgccgatcctcggcgcgctccggcagggcggcttcccgacgacctcctccatggttagcccgctccagtgcggtgaagcttgcaaatcaaggatgtctggtatctcggcgaggtcgcagcttcgggtagatgcatcaccagcggcttgaattagcagcgtcgagtccagggacaagtagcactgcgtcggcttgaacagacaccggcatcgatgaggcttctgtgacgcgtagatgaatcggccaccgcgacttccccggcgacgacgatacgtgtagatggatccctatgcatggatgtgtgcgtgctgtagatgaaagaaaacgaaacaatcttgctagcttttacctggactagccatcaagctcctctcctgcgcttgctaatgatcggatcaccgcgcgcgccctctcctgccggacgccgggactccggccgaagtcgctcgccgccgccggtgcgtgtcgtcgatggatggatcgccgatgagagttgatggatggatgtgttgatgctggatgggtagatgcgttgatgatgggtggcttgtggatgctagatgcgttggtgaatgaatgtgtggatgagttcgtgaatgcccctggctaccgaggggtcgacgccttatataggggtctgaggtcggtgctcgccgcgtccgcgcgccgtttcctccgcgtcaagttcgttgcagataaggcttgatcgatcagtttgttatttgttcatatccttctttgattttatctcttagcttctcctggcgtcaaatatctaatttgtaattcgctttgtttctctgctgctgggccacagtccggtgataagcgcctcgccagcgctcgcgcgaagtaactaactagatcaagtttgttatagagataaaatcaattggtttgttggttatctcttaattcatctggttttatctcttccgcatattaacttctgaaatcttggcgcgtaggcagctaccgtcttcggccatgggccgagcctatgattaatcactcggatatgcataggttgcttaatcacccaggcatgcacacacatacgaccgtctactgtagtacatgcatgcatgcacgtgattgcctcaccagccaatcttcacacggctagttattggttaattatacatgcacatatactaatccaagtatatatattcccagctgcctgtgcatgcatgtatttgcgtgtatatacatggccgagcattgcgtagaaatgataagctagccaacttacaaactgcttgtttgctttgtccatcatgagtaagtcttgtgtacacatataatagccaaaataccatcaaataggtggacggcagggctacgtctctcctcccatcggcgggcgcgagcgggagacggcgctgacgggggcacggcgggagcttggtggagtggatctggcggtgtggccctctccgtcgagctgccgctgctgtggtccttggtggcgcggaatggcgacaacagcgaggttaagttgccgccgccaccaccatatccctttcctccctaggccgctgccaccaccatctttcttctcctcgcttggctgtcgccgccgccatcttccttctcctcgcttagccgccaccgccaccccgtcgagctcaccagatccagcctcgggttcgccggatctagcaagctgcaccgcttaggggatgacgcagctggtcggggcggcggcctcgccggcgaccgtcgccacttcgcacgggatgtgggggcatcgcatggggctacggcctctcccaacgcgccgctccaccctcgctgcaagttatgacgaagaacgggtaacttagtttggctccgcggacttcggttgggaacgccacgcacatatatgggaaggaatatctgacgtggatggttggggcagaatgccacctcagtgcactgtgaatgcccttaatagatggggtggggagagacaaagggctcccgagcctgacgcgtagtcttttcgggagaagctacaaacttcaaaaaggaaaaaaacactatgagtcccattggttaccctaacaaaccaaagcaaaagctgaaatttatttttgtcaaacttgattttgaagttgattgtaagatattttcaacgtagtttatttttcagtattggtttttaagtcacaaacatatatataaaaaccttacctataaattaattattatttattaataaattgttttggcttattaagaaatactatacgtacaacagaatgagaacttctttttttacttataaatgttactacggctacacttaatctaagcctcacatcaataccatagtgcctgtgaacctcgaatattaacgattcattcgtacaaaaatcctacaaaatttctgttaagcagtggtcattatggacagatccttttttttttgtccacacgaaaattctatgaagttcagacgtttaattgtccttgatcatcaaagttatatcgaccgtccattctccgatgtactcatcctggccgtccaccgctacgagccttctccccctcgtacgcatacgcgaaacgcccccccaccgccgccgccgccgccgtattcctcctccgctcctcccttctcaagcaaaccaccggacctccctcgtctccgcatccggtccacccctcgctgctcgggtgtgcccctcgcgttgccctgtacgccggcgaggcgctatctccacctcatcgtgctgattttcccttctgtgggtgtgcaggaatcatcagaaaggaggaggaggatatgccgctgggactgatactgagctcgctcggaaggtcgatgcggcgtaagcggctgtcctcgctcggcatcctctcctccaagagggcgcctcgggattactacaaggggaagaactgcaagcccaccgggttccacacccgcaaaggtaatgccttgcgggacgctctgtgatctgattctagtcgtctgtattgctcaagcatgctctctttgtgtataatcgcatataagattgcgaccaggttttgcttagctgagaaattttgtgatttcgaaccggatagtttaattaaaccgaacgttgatggagaatgaaatggtgacagttgctagtcaccacactatttgcccaaccggaaatctggaagaacctaggaagggatgttctttatgtgaatcgttttgttccaggatttatctgagtcaaccgtgcaagtaattgtctgcttactgtaatttgggaggtgctttcaataatgtcaaatatcgcttcaataaaaggtgtgagtaaccaaagtttaataaggcattaaagatctagtgagtagcaaataacatttcaattcaacaggtccatttcaactggtggttcagccaagcagaaatttctcatggacacattgaaaaatgctctatctatcatagttacataatggtattttaatttgtatggtatataatcatcctacagaacatagtaaatcttggtgctatcatggctgcagctgtactgtggctacgctgcagccatggcaaggtgcaaagcactattgcattggcttgcagccgcagcccacacaaccgcagcaaagagatccgaacagcctgtttgttagtctgccagaaagaaaaatattgaagagcagagtctggtggtattcagttcaccttgaaaatatgtaggcagtattcaacaaagaggcccaaacataaaatattgaagagcagagtctggtggtattcagttcaccttgaaaatatgtaggcagtattcaacaaagaagcccaaacatatctgtatgcaagtacagttttaccagtgctagatgattatgggtaacaaattacaggataacgcaaagacttatccatcagtggatatttgctcttagctataacttagccttgacctttctatgcaattcttgtttggagcacggacatgtttaaattttagttatcattgattagtttgattgttttgtgcaagggacggatacttctccattgtattcctgatttacttgatacttgattcaaatgacatttgtactaactattatatgatcattcaactgattgtcgttatctatgtccatcccttttctttcatgagtaaagcaacctacttgcttagtctaattttcgaaatattgattaattctgcaggtggatatgttatggtggatgagaagttgccaagatttgtggtccctgacttgactgatttcaaggtaattagcatactgccacggtttagtgtccactgcttctctggttaattccagtctgaacttgctgggcaaacttttaaaagtaacttaatggcacctaacaaacagaaaatagctaatataacataatcaaagctctcagttctgtttgaggtccttcttaagaaatatgatggaaataacttgccatgtccaaattttatctgaaaagatgatgacttcattccttgggcaatgagttgaatgctccataatccattactgttgaaacgtttaactcaggcaagacagataaattgatcatgaatggtataacatggaattcttctttatgtggtatgagtgaccaaggaatcatcttgttcctgttttttttcccttttcaattatggttgtgtgtatagtaataaatttcctgtataaatgactgcagttgaagccgtacgtgtcacaatgtgccagggacatcacagcgtcatcggcatcctccacttcagcagagactagtgaaaacaagaagtgatcttatggatgctctaggcattgtttgtgttttgcaagaacgcagagcatctttgcagttatgcttttcttatggtgaaaacaagaactgatcttagtgcatgtagcttcatcgtctgctgcatgttgactattatttagctacatcttttttgtaagagaacttgataggcagcatatattatctgaattgtctgttacatgttagctgtttctctggctctaataaacgtccatgtctggaggcatatgcatgaggtgatgccactggttgcaaatttgctgtgatataaaagtgagatttgatcatttgatcctgatcacgcacgacctatccactcgcaaaccactgaaaacaaagttgattatcttgtgctgtccagttaaactggaactgaatttctttcctcaaggcacagactaccaaacatgttcactcttggttgtgtgaagtttgatcaactgcaggcatttatacagactaccatagaaagtcataggtatgtctggcaaacttgcccaaaatcatgctagctccaaaactttggcacctatttgtaaggttgccaaaattttgcaagcacatgtttgttcgttcattgtgcatttttcttgcaaatcgtaggcgaaatatagttagacacaactacaaaattatccaacacaggctattaacatcgaatttccagcccatgaactcactcccaggtccactactctctccggcccattagggtttgctccgcgagcatctgacaacgcccgagcctataaaatgcgtccacccccctccaccgaaggataccatcgccgccgcagaagccttcagtgttcgatccttcgtttctcttttcgtttttgctcgtctcgtctgtgttcgattcgtttgtttttggatttgtggtgaatctggtgattgtgttcgtgcttcgtcatctggtcattgggaggattagtctctaatcggttcccaatcgactcgttcccttgaagcaaaatcgccctgttgtatcctgagctcgccttccaatcgtgccctcggatgcgtctcgccgcagggcactcggcggctgttacatacatccgaacacccctcgaaacaatagtcgccataaaatcaattttttgttgttgttctttatgtagatcttcgttacaatttgattcgatctgttggtcgctagcaacggtgatgagtcctacagacctgtaatgactcctgcggagatgatcgcatggtcaaagaacatctaagggactgagttgtcgctcatgatcaaccaataggatttttagcttcggttcgatttacttttgcgtcgtcgatttttgccagtttgtgtctcggcttctctcagatctaatcgtgccttcggatgaatttttggttcgtgggcaatggtgagatgtgaagcaaaagcaatgtgttcctctcgctatccggcgcggaatttgttgatgcgattggacgtcgaggaactacatctacactcgcttttttagtactactatttgaagtattcttctaaaattgtcttggaacaaaaacatgcgtacagaaaatattgatcttaacgaatgaaccgcggaaactgcacgttcctggaatggagaattggagatggcctccgaaaaaatcttctcgtttttcaaaaaaaaaaatgtaaatcattaattctactagagaatgccccgcgatgctgcgggattaacaaattgattaacatgacaggaggtacaatctcaagaagaaatagagaaatagaagacaatcttaagaagaaatagaagaaataaataacaattagcttttttggagaaattttttttaacagccctatctagaatttggagataatttaggtagcatactatttttatatagattgatgggctgaataaatgtgtgatgtgtgtggagatgggcaaatgtgttcatgtgggctatatttggcattgaggagacgttcatataggctatatttggcactgagaagacgaagagactcacctggttgggctcaatcctacattccatctaacctctgaaaagcacgaggtttaagcttttggaagaagggattcgtcagtcggtaggaaaagtactaaaattgtctgggccgctgtgggcctcatgcctggctctctttaccgggcctcggcctctatatgggcctaacaggtagacatgtttgctcatctcattcgtcgcgacccctcgcctctgtatatgggcctaacaggtagacacgttcgctcatctcattcgtcgcggcccctcgcctctgaatatgggcctaataggtactccgtaggcacgttcgctcatctgatctcgccggttctctgtaaagtcaaatgctgtgcctaaagaaaagaaaaaccaggcacggcgactatctgttttgccgtttgtttgaagtttgaacagctaataaactactactccctccgtcctaatataaaggattttaagtttttgtttgtactatttgaccactcgttttattcaaaaatttttttgtaaatataaaaataaaaaattatgcttgaagtactttggataataaagtaagtcaaaaaaaataaataataattttaaatttttttgaataagacgagtggttaaacaatacaaataaaaacttaaaatctcttttattatgggatggaagaagtactacgtagtactcacctttcttcgccgtataatcgaaaaactaaaatactagtatcgcctttcgccgtatatttcgcctcacatttgaacgactaaaaaccagttttggcatcctggtttcgtagctgcgtcagtgctggcgcctgccattcctcaaggcaagccccttcaacaaagcaacgattcttccaaatatccaattcaaagttggtcttttttgaaagaacccaaataggcaaacacggtactggccataaaagatcccccttgcgttcgaaatcgtggctagcttgacgtgcttgcgttcgactctgccgcggaaacgcagataaaaataagtaaataaatcacccagcctccttctgcccggccataaaacggaggtcgggcatcatggggatggcacagtcgtcttcgtcttcctcgcgcccctccgactccgagcagctagaggagcccagcaagccggtcatggcgctcgacaaggccaaggagatcgtcgcctcctcccccgtcgtcgtcttcaggtctctctcacaccttttcctttttttattcactcgcgtgtatgatgtagcagcaaggatgataaacctctgctgaatttgtgcttaaatttcgtgataatcactaagctgatagcacatgaaaaaggtcaataccaaagatgttccttttgctataaatttattttgctgaactttctggagctaaatagtgaccatattcatgcaagttaccagccaatgcataccaattagttggtgtagcaatgttaccaatgtatcacgtcgttgtctgctgatgatggaatcgaaatattttgtttgtaaggaatgcacaggtataatgtggaacgagttgatttgatatgcgctcaacttttaagtagcttctgaaagaaatgagaaataattgttaccttttgtctgtatacaaccatattacatcatgcaaattaaaaccaatcaagcaatcatataaaacagagtttaacatgattatctccctacttctgcaaaattgtgacctatgctgtcctaaactccaattttgatctttcttcgtgtcattcctcttcctggactggccatagcaagacttattgccctttctgcgcccgagtgaagcgattgctggcagagctggcagcaagttacaaggctgttgaattggatgtggaaagtgagtggattatttttttttctgttattttctttcttctggttatttttattgtacatactaacatatgctaaatttcgtcttctttgctctccaatctatatacaacatattactccgccgtgctgcatctattttagatatcattggatttattgtagttgagtttagagcaaaactggttgcaataatgagtttaatcaaattgaaatgctgaaaatggctgtaaacttcactcttttgaaagaaaccggccggttatttaaagagaagaaaaaaaaagagaaatgcatttgcaaaattctgacaaatagtgcataaaagagaactaaacaaccgaacagagaagaaactacagggacccacttatagctctgatacatcaacactcagtagggaggactagatcgacgttaaaacagtgtagaaaaaagatcatatattattacatgagtcaattttagaatgtcctggctattctttagttcatacattgtaatttatcattgaactaattcatcctcataatacgaaggtgatgggtctgagctgcagtcagctcttgccgattggactggacagagaactgttccttgtgtcttcattaaagggaaacatattggtggctgtgacggtgagttccttgttcttaatttgtcgtgaacttgtgatactaatgtcatcggaccaacaacattttcatgcatttttatcgctgtttaacttttttctgaacaagaaaatcgctagaacaagggtcacttaggccagagtttttctacactattttaacgtcgatcttcattgatgtctttcaaacagataccatggcgatgcacaaaggagggaacttggtccctctgctgacggaggcaggagcaatcgccactccttccctgtagataaatacctttgccaaaacgtgtttgtggtgtgtcaatgtcatagaataaaggcgaatatatatggggacttccactgtcagaacaacttattgctgatagtagtagctttgggtgactttcaagcctgtatgcagcactactctagctaataactcattttgtatgatttcattggtagcaataaatatgattagtgcgtcctgtgaatgagactgatgacatcggcactccaagctcctgctactggctgccagcctgcctccagatttttgagatcgagatgttgttgtgtcgtcactgataccaaccatccactcctctcggtggaagaaatacagccagtgaactggaggaaacacccttcgtcaaaatgattgttttgcctggccatagttcagagctgcaatcaaaaatcttggttgtgtttaccattctgctgaattactgaattacagcgctggtaacagatcagtaaacaaacgacagcgctgttaacgctaaacccattttgcagcatcgctgatttgctgccggagcccggaggccaccacgtacatcgccagtggcaaacaagaaaagcaaagctacagaaaaagcgctaggccggcgccacgagccgccaccacaagtccacgaccagtcgctctccggatcggcgtagtggcaatgggcatcccaagttgccaacacggggaaaaaaaaaacaccccccatccagctgctgctctctaccggccactcgtctcgtccggtagctcaaaatcttttactcatcagcccagccaccaccgtatcgccatgctgcccatcaaggtctgtactacgtgaaaacgtgagagccgcgtttccctctggatttttctccgccttggcacgtccgcggtgggctggcgcggctttcgtcgtgatccgcaacggagggcggggacgcggccaccgtggacgccgccgcacgtacgtgggcgtggcgctcccactcccacggcaccaccacggcaccacctccctccgcctctcgcgtcgtcgtttccacagtactactacagtagcgcgtctccctggcgttcgttcgctggcccccagctcgcgcgcgtggcggctcccgtatcgcacggccacggccccaccacgcccgccgcccctaatcgcatccgcgattaagatatttccgtgccaggtaggcgtagatattttctcaccgaaatcacacgccgccaggccgggcccatctggcttaaccacgcccggctcttcccctccatccaacctggccctcccacccacggggccgcggctcgcggctcgtcccgtcccgtcccgtgacgaatccattgacaccggcacacgcacacgcacacccgcaccgcgcgacgcgagtacgcgacacaaaccgctcgcgacgagccgtttcgtttatttttacaccgccccggcgcggcgtgacgaggccttttcttctttctttcatctctcgccgagccgagccgagccgagccgcgtgccccaccgagagaggaaagcaaaaggtagggggaggaaaatatcctgtgccagtagagcggacaccaacgccgccaccaccaccgccgccgcctcctgaatagattaggcgcggataatggtgcgggccggaccgcaacgcgcggcggaggaggacgccgccggcgtcggcggcgggtggcggcggtagcacactgcttagcctctgggggcgatactactggcgacggcacgggatatggaggaggaggcgccgcccgcagatccaacaaccgcttcgtcctcctgcgtcgtctagtctaggcgccggcagctgctgctggctgctgtgctgttcgtgctgattcggacgcgtcggcagctggtgacaagtggctagggggggaatccgtgcgggtcggggtatggtgggcgccggcgagggggatcgcgttggcggcggggcggcggtagggggagggcagcagttcgtggaccggagcaaggtgaggattctgctctgcgacagcgacccaagtagctcacgggaggtgctccgcctcctctgcaactgctcataccaaggtcagttcagctttgtctgcttagtatttggtttgctcttataattaaggattaagattgctttagtagatgaattagcagttctatcacaccttctcgcatggaatgatacgtctttgtttttgtttcagtgacttgcgccaagtctccgaggcaggtgatcaacgtactcaactgcgaggcgggggagatcgacatcatcttggccgaggtcgatctgcccgtctccaagtgcttcaagatgctcaaatacatcgccaggaacaaggaattgcgccacatccccatcataagtaagctgtcctcctattcctctgatgcccatgctcgtagggttgttgtagtgaccatcctcatctttgatgcgaattatgcagtgatgtccaacagagacgaggtctctgttgttgtcaagtgcttgcgtctcggggcagccgagtacctggtcaagccactgcgcatgaacgagctgctgaacctctggacccatgtgtggcggcgaaggcggatggtaaaggggactatgttgattcatcttcaaattctgtgttgaaaagcatgctctaagctgagatggctgtggcgttgctgtagcgtgtatgagttgatcttaagttgaatgttggtgttggcagcttggtttgtcggagaaaaacttcttcaatgacaatttcgagttggcgttatcggaacctagtgacgccaataccaacagcaccactcttctctcggatgacacagatgataagccaaaagaaaacattaatcaagaaacaagcacctcgaatcaacatgaatatgaggtaaccaatcaagtactagttatccttttatattttgctgtccaacatactacttctctatttagtatctttctacctttgtgttctgtttagatgctagagcatgcctttttgcctcatatgttcaattgatgatgataagatgctgaattttttgcatcagtctacttgttaaatgcccttgcatttcttgatatgtttgcagtctaatccttctgatgctgagcctaaacaaaaaggcacaccagagggtttactagtctctactgaaggcggcgaccaagcttgtaagtatcttgagccttaaaccatttcctttagctgatttagcagatcccccaattgaagaatagtttctaaggtttatgcctttgcttttatgccagcatctcccggagtaatgttttcacgtccaataaagactaacttgagggttgctgagtcttctgcttttctagcttatgttaagtcaagcaccccaactaccagctcatttgacagcgaactacaaaaaggtggaaatcggttagactcttcggatcacaggggtaatttctctagtacaactgacagaagtgacactggcactgatgtaaatattcgggataaagaagcctttgagatgccagtgcaataccctgtggtatgcttttcttcctctaacttgcatctggagcgaagcaatgaaggccaaaatgatgcttcaggaactcctcctgtatatcattttcccttttattacccagggatgatggaccacggtatgacacatcctccggtgcaaaatttccaagggaacataaacaacgctcaagtgcatacaccacaaacgttgctccctcagtataatgtttatccccaatgtcatggtgtatctatgatgccaccatttcagtataatcctgctggtatgagcattcaatcaaatcaactgccaacacaaaatatgtggccacaggcatcaagcacaccaatgcccgaggaaacatgtagtcggtctgaacggagagctgcagcacttgccaaattcaggctgaaaaggaaggaacgttgttttgacaagaaggtgaggtacgtgaataggaagaaacttgctgaaacaaggccgagggtgcgagggcaatttgttagacaggcaaactatacagatataaccagcactggagatgatatctcagaagatgaagatgatgatccatcctccagggaggtagagatggtttcttctccagagtagtttgaaaggttttcctatatgtaaaatagagtgcagatgattactgctcactttgcaactcattagatgtaggcaatacatttcttctgcttttaactaggcaatacatccactcgctcacacacaatacatcctttttgtcccccaaggaacttgtggcatatccatcactgttactatggacgttttggagaaaatcatctttgaaggtgagatgtaattatgctagttagtgatgcataggccagtctagatcgtaaccatcttgtttcagaatcttataggactttactcagtgctccttcttagacacgtttttacttccattttctcgatgttggaggctgtccatgtttgaacatcgtgttctaccacagaagtcgattttggaggttgtacatgtttgaactttgtgttctatcacagaagtttgcgagcaccattgaaaacaaggacactagcgacctgacctaccgtactgttctgagtagtgccaatatttctaggaaattgtccctttctaaggacaatttcgtttttccccccactttcatcttcaatattgattttgcccctatcaaaaactttactgctaatccatgtatattcgtgacaaatgtcgactatatattttgtagctgtactttgtcatgttcatctattgtatctctgcggtcttctcttctaaattgtctgcacacacacagataataccacagtttctgatctaggaagcagactgatcatcatcataattttcatgatgaatgcaaacttcagttccattcgcacatccatgaatgcaatttgcgaaatctcagttccagttccatgaattgcaaagtaatgtgggttcaagcacggtaatgaataaatgctcattgaaaaggaatcagacgaggtcatttcataaaatgggatagttgatggatcatggatgagaaaggaaaggtccatcagcagggagagttcctcagtgtcagtgaaacgttctgtggttatgcggatttgtgctggcacgacagtccgtcaccgtgtgctccagctctggtatcaacagtccattgctccgccagctcgatccctcaccggcgatagcatctgctacaatcattaccgaagccaagagcgacgccgccaccaccggcatcactgattagccgttggacacaatggccgcgtaagccatgcgagctatcagaatgccttatccgacatatagccatcatttaaaattatgaccagtactatacatgaaagcaaagtagcaactcacgagtgttcagttattgctcagttgaataaaatggcagttattgcttccttgctttatcagctaaccaccatatgatttcctaatagcacaaaggtgacaatatactagtaacagtctagattcatactttttagattataatcatgccaacagttcagaacatgcgaagacacctgaatgactttcatgatcatactaatatggtcgagaggaagtacgattcgtagatagcatcgcgatacatcagatcatttgagtgatacaggtaaatagcgaggtaggcaagactgattcgcttcgagggatccatggaacatggtggtccgaggtttctccttcagtactttggtgctggcttttgggttggcagcaacccgaatctcttcttcaacaggtatctctggcgtgagtacttgtcatctggagagaagcgagctgcaacacaagcacaacctcagagatcttttttccctcaaaaatacatgtagaacacttgatgaaactaaacaaggaacgcaatcactagattggcttatgtgaacaaagagctatgacctctttaagctcaatcttctaaggccgtgtttagttcatcgccagttttttttttgacgtatacagacacacatttgaagtattaaacgtagactaataacaaaacaaattacagattccgcctgtaaattgcgagacaaatcttttgagcctaattaatccatcattagcacatgtgggttatcgtagcacttatggctaatcatgacgtaattaggctcaaaagatttgtctcgcaatttacagttggagtgtgcaattagtttttctttttgtccacatttgatgctccatacatgtgtctagacatttgatatgagggaaaagttgaaagtttgaagaaaaaatttggaatctaaacacgtagattccaaattttttcttcaaacttccaacttttccatcacatcgaactttcctacacacacaaacttccaacttttccatcacattgttccaatttcttcaaacttccaattttggtgtggaactaaacacagcctaagtcaagaacaataaaaaaactgttctacttagtaaaaaatgtccgtacatcatctgagaatcagttccaaaaacccaaaatactagtataaggcacaccagcagattcaaaactctggttaggcaatgccttcgtgctcagcaaaattcccagcagaccagcactaattagccagtcctattctaagcaccctttgatagctcaaggtatgcatgacaaaacgagactataaaatctcaacaaaaagtataccacctttcatgcttcaaactgtttgcgggtttatagttaggccaacaatgagattgacatacaaaccgaatgttaagttcttatttacactaaaacaaacagcacatagattggtttatgacccaagagcagataaagaaatcagaggaagtgaccgtacctgggtgagcagactgcgtgggaacaccgagaggagattccttctgcaacgcaacgaggagacacacctctcaggcatggactaacatcgcaaaccatacagtaataatcactaatcaaacaagtaagcgcaaggggaaagcctatacgaaccttggtggtgtacaccttgtcccccttctcgttgatgtagtactggagatacatcttcgatcgacgcagctgcaggacaaaaccgtgagaaattcgtcgaaacaggggtgagatttacttctgagaccaccacgcggctacgactatgccggaaagatcagaagaagagaagtatgggaccaaccggcggcggcggcggtggcggtggcgaacgagcggcgggcagctgggcggaggaaggagcggagggcgcgcgcgcggggagaagggttttgtggcggctgcgttgtgagggattggggggaaggcacaaaccctaaagaagaggtaagttagccggctttgctccgtttttctaagttggcggtttggctgggttgggctggttgcgggcgtcggcgtggaggcggtgttgatgggcttgaaaccagtgttcggcctgctcacacatgggcttggcccgaaatatggttattggaaggaggttcagcgattaatcggaactacacgaaaatttaatgtttgtaaatattttatatatttcataatttagtatatcattcttttgtgatttaaatgtacgactacataaatcgaatatgtttttgtttttcaattgaacaatcataatttgatattaacttaacatatagctgatcccgacactcgtagttatacaccaaatagtgcaggtttggttcataccgtttaagtaaagcaagaaaaatatatgtaacaaaatataaacgatgctaaacgagatcttagaaataacttataagctatcctatgtacagacgattattaaagcatctaaataaaaaagggacaaacaatcgtagaaatataatggagttttgacattcatacatgataatcgtagcccgcatcacgttaatgaaatataatgcagtatgtatgtacgaccaactaaatgatcatatagctcactctacttactccctctatttaaaaaacaaaccaacaagcctagtacaaaatgtgaatatgtgatacatcatgttattatgaatctgtatccagtattagatttgtttttttatgagatggagagtgtatgtatcactataaacatatttgtcacttgtgtgctatatatgcatttgacaatgtatatcatatgctcatagcacataactatatagagaaattttataatagttaagaaagtacatgtaataccaatattttacactaaaaatttgatatatcaagatgtctagtatatggagatatcaagtttcacactaaaaaatatggtacctcataccttattaaggatagtaaaattacccaactacataacaaagcaatgggaacatatcaagaactacctcagcacattctccagcacatgtctgataactatttttctaatcacaagcttataaaaaaacaaaaaaaaagactccgtaaaaatattatttatgacaaatctattaatgtcatttttacgacattaaatcttagcgcttgtacatatatagtagtgatttaagattcaagattcgaatgtatgcattttgaaacgtcttttatttgagaacggaggaagtaaaaatatggtcacgaaattaacatgcaaactgatgtgcgataaaaaaaacagcactaccaagtgcatattgtcgtttttgttcttttttaatgattagattcttattagtggagagtgcaaacggtgcacttgaagtttcttctattcagttgtctctaggaaaagaaagttcttccattcagtttgtccatatgaaaaagaagctcatctccctatattctcactacttttctgctttaatatatattgataaggcaaacacccctaaagtagagtagtataattaattttgccgcagagtatataagtttaaatgcacatggtatatagagtgctagtgatcttacaggcccgaaagcatatatatgcaccagaagaatgcacatatcctatcttttgctgattgttctagcccgtctgatcatcggaataataaacactaatgatttgtttgtatagagataatcaatagatatctaggtgaccatatcttggtgcagtgtgtcttcgcaccacaagtttagcacaagttgctgttcaaccgggccaggttagcctccctatcaccctgtcaagaggctatcaccctgtcaacaggctctgcttccagtttggtgggagtcttcttgccagcaactgtaggatcacacaagaaaggggttcaactccctcgtcctccttggcacctgtggctagaaaaaatgctcatgtcttagaggggattatttccacgacggagatggtggttgatcgcatcgtgcaataagagaagctttgggttgcggtgttgcccaatccctaggagatcttcttggcacttagtaacttactctttctcctttttctcctttcctcgttgttctcaggagttcgattatttttccctagttaatttagtgtgccctccctctcccatgtaacctccatgatatgtgttagtagacagtggcggacccaggatttgaacccagggtaggcctagccaaaaaaaattcgaatgcaatacaatatgattcgatatataatgtggtaaacgatacagtatataactctaaatggttcaatacaagtagaaaataacaaataagtttaaatattacctaaatcaaaatgtaaatttttttttgcaagaagttcacaagcattttttttgcttcatgcttttgaaaaagcaacgcaatgcttgacttctccatgcctcaatctcctggactcctaacaaccatgaaccatcaaaaaatgcaaaattgttatataaaggggtagtacactagtgctgcctgttggtttactactagaactctagtctctagattctagaagggggagagggactgtggaattgctcaccggagtccggagaggcgaagagccggagatggagtggcgccggccgccggccggcctgggcggctgccgactgggcgctgctgtgctagccgctggcagcgtcgaccgtcgggctcgggcggggcgggagccgggagcgggacgccgggacgacgggagcaggactgtggcctgcgggaggccaccaggcgatggccggaaggcgcggcgggacggagagaggacgtgtccgtgcgggcgccggcgcggcgccgccgccacggctgggcgcgtgcacctggcgggaccgcaggagccggccagccgggaggagtggcgggggcaggagcgccggagtcgcgccggcggccggcctgccggctcgcgtcgcgggagcgctgtcgccgtgacgccgtcgagtgggaggggagagagcgcacgccgcgcacgggggagacggccatcctgaagaggagttagggttttctttgtttgatgggccaagcttttttcatgggccaaaaaaatgaatacctaggggtctctggaccaaattttaggatagtcttgggcctacctggactaccccttgggcccgcccctgtcggtagatcatagtcgtcaaatctctctcttttccactaatatattggtgtgtaagtcttttgcccgttttaaaaaagaagattttaatttaaggaccactcattggaacaccatgctgctttagtgcttttccttcacttctcctcgtacataggtgatttctaaaaaaatggaaatgtacgcgagttaggagataacctttatttccctcgaggaggtcgcctcccgtttgttgttgtacatgtcaaccatgcaaaatagtaataattttaatatcatatatcaatatgtgatatattactttactcatatacaagtttaaattcaacatatacaagttaaaaaaatgtgattgtgaatagtacacgcagagtttaatttgttccttttatttaaacttgtatgtttatagaatcatatcacatatttatctatgctctcattttttttaagaaatataactatttaaatggcatgaaaagatatgagggatgtcctcttaaataaagaaaaaaaataaaagtacttatcccacttacttaggcaaaatcaaggggatggaccggtggttaggagggtactgatggaggccgctatgatagatagatgaattaatagtggaaattacgttggtttaaatttgaagtgcatctaggtcctctaagaggattttgactaattgatgtcaaaaatgattaatggattggtgtatttaacaaataagtagacattagttttattcaagaaattcattgacgaatggtgacccttaaaaacaagagaaagaatttgtaaatgtgtcaaagcgatttaagttaactttaattttgattttgaattagggtccaggtatgctgtacatgaagaggatgcacgagaatggtttaattgtcactcaagtgctcaaatcgatcgcttgatctacagatgagagtcatcttacgcaacatgagcactgggttctagctttttgttggtcccgaaagttctagtacatatatagactagaagtttcgattgagtgctctttgttgccaaggactagttgactataagttctattatagaaaccgaaagttttaaggtaaggttgcttggcttgttttgtaggtcctcatgcgcgcactggaagtttcggcctatactgattgttgcaaagtgaattttaggaagtgtgtctattcactccctctagacaacatcaaaggtacattcacaaatataaaaatatattttaattttgtcttagaatcaatgattaccccaaacctcccccgccttatcctcttccttgagacgacctcctccaatcacaagagactaaggcgaccttcctccctcaccctctagcacccgccccatttttcctcttcttagcaaaattaacaccgggaaactcgacgccaacgagccccacgataggtttccctctattgagcttgtcctatttaccatgtcaattctttgcgccaacctctaccccttcaccacctcctttagtcgacaacaccactaccaaaccctcgcaccatgccctttcctgccgcaatccacaactccgtgcaacttaactggttggcacccatcttccccaccatcctttcccatcccaccagtgtcagccatcatccacttccgaaccccctccccccgttcctcaccctgaaactctgatccgatggggtttgggtagtagagtccgtgtctgtggctctcgtgaacaccccgacaaacgtggagtttgttggaatacattcgctgccaacgagtgctcgccccttagcaaaccctaagagtaatatcctattaccacaagtactataagaaggtccttactagcgtctctatgaatgaattctcaccatgatgtatagaataatttgcctggaagtacatggcctcgaatggacaactgtcaaatttcaagagctcagatgcacttttaacacctgattttcccccctgcagtcctcctatattctttctccaaaagcaaaacaaagaaaaaaactcttcccttcctttttctcctagaaaaagcgctctcaaatgagccaaacatgccatcgaggcgagctagctactcaaagtggagtatagttggtgttgcatccttatccaccaacacttcgtgtacacaaaatggcctctcgctctcacctgcatagtcactacgtgtgacctcctccacacgcacaggctgctgtgtgctatcagtttggatcgatgcacaagaccaaaaggaacatctacttgtagagtgtgtaggcttgtagctatagctagctagcaatttagtaatcgttaagctatagctagtagaaagcgaggcctttatcctgtagcggagggaagctaccccagcagcagccggcgccggcggcgcagtcgatcatcatgtcgtgcaccacgtcgtcgaggttccacaggctgccccacgtggcggcgccgccgtcgagctcctcgcttgagccctcgctcgtcgaggcggcagcgccagcgctggccgccacggcgccgcactcgccgccgccgctgccgaggaggtcgtcgtaggaatagggcgacatgtctcccgggtggtagtacagcaggtcgtccatgtccggcgccatctcctgcattatctggagctcgccgtcgtgggtcagcgaggtggcggctggtggcgcgacctccgcaaggttgtcgtccaccaccgcgctggtggcgtcgtcgtcttggccgagctgctgctgctggccggtttgcatcagctggctctgctgctgcatctcgcggcgctgcttcaggaaccgagccctcgcgcgctcgatgttcttggacggcttgcccttcttgaagtgcgtcctccagtagttcttgatctcgttgtccgtcctgccaggcaggctacgcgcgatcgtcgaccacctacaccgccacagagaataatgcgatcgatcgaatcagttacacattcatggcaaaattaaacgcgatcgagctcgatcacgaaaggatttgcaaatgggttgttacctgtttccccacaaggcatgaagctcgagtatgacgctctcctcctgtggcgtgatcttgcctcgcttgaggtcaggtctcaggtagttcacccaacgaagcctgcagctcttgccacttctcttcagacctgcaaagcacgacatacacaggctcagtactgtaagatacatagcatcagacagaattagctgacgtacatatgcagaaaaagtaacatgtacatgacacacctaccactcccatttgtacttaactaagaaagtaaagcttggttaatgctaatcatctgaagctaactctcagctaggaaaaggatttccacggttacagctaggaaaaggttctgacgaatttacacgcgcgtgcatgcagttcatacgcggtttaattaattaatgcatgtgctagagcaagcaccaaatgcctattctccgaaaacacgatcgtaccaaatgccgcaattggaatcaaatcatgcaacttgacaatcatgggcgacatatgcaaccttaaacatgtactaattgcatgtttgactgccccaacgtgcaatttaacaaaccaaatgcaaactgatgctactagctataatttcttcctaaaaggctatatatatcgagcttcttgatttgggacaacgtgcgagagaacatcgaaatggtcacgaacatgcaagaacaccactcaatcagtagctatagcacctacctgtgatcttggcgacagaattccacctcccttcgccgtgctgcctcacgtactcaaccagcagcttgtcttcctgcgctgtccatggccctttcctccaccctccctcctcccttccccaagcgaactgctgcccttccattgatttacacagacaaatctcttcgtctatctcttgatctctctctctcttcttttgcttcctccctcctgagctgtctccgctcgcagtgatgagctagcgagtgatgaagcgatcgatgcaacaaccgagtgagctatcgctgcatatatatccgcacagtcgcctctctcattctccgggtcatcactcatcaccacggcccaggccatgtcgctgtcaggggcatcccactgccactactgctttcggaggagcacggggttgccggaaatgcccccgcggtgattcgatcggtgtcgcgggtaattttgataaaccttttttccgcactttgtctccgctgatatgatgatggattaccgacttaccgtaggatttcctgccgaaagcgctgcctctgcctagcttagctgcatgcgttttttttggtgttgcttggagtagccacgacaaggacaaaaccaaccatgtttcctactttgtagctaggcagctatttctcctggagggccagatcgctacaatttgcaaaatgattccttttaatcacactcaaaaactcaatcaaccaagtatatatgtgatagtagttacaaatttttcttacggtaggatggaccggggtaccacactttttagtacgaacagagtattgcatctctcggtatttctctaatctagtgttgatgtataaatatatactacacaaatttagtaagaaatttagtacgtgtagcagtgctcctacaaaataaataaataatacaattaagatgaggtgcctcctccttaaggccttaaaatcacttttatttaagggtatgaattttgaaacttaaataactctaatttttaaggtttgcactttgaaactaaatatggtaaggttaattagatccatatcactacaaatgtgttgtttccggtaaataggtgtcaaacggtgtggcatgtactacagggttgtaatgggtcctttcacaatcctactcaggctgtgttcgtgaggtggacctccctgcatgaaaaacgtggtggtttattaatgtatcattaattaagtattagataagaataacttgaaaatgaattaatataattttttaaaataactttcgtatatttttttttaaaaaatacaccgtttagtagtttgaaaagtgtgcacgtggaaaacgagagaggtgagttgaaaaagagaagaaaagaactcaatctcaatatatttttgagtaaagaaaatatatagaaattcagtccactccacttcaaatctaaccctcaaatttcgtagaaaataatattaggcccattatcacccctaactgcaacagtaggtccaataggtacttcaacttacccttttttttaacttggccgatttaccaaacaaaattaaaatgagaacatgcttgttaaatcctattgttgagctgagtgtccatgtgttggaagagaagtacaatatggcatatgtagacgtgctagtacatcgacttgacaaaggttatgggtgatttttttttagtaaaagaaaggtgattatttttttccctaaaacatgaagtgtgaatatgtggaaactttagcatgaatatacttgcttgagtatgtgattaatatgagccacatacaagaattggtggattgagtcccaggttgattatgacttatttctaactttcacaaaataaaatttcctaaaaatatagctatgttgtgatgattgttcgatctatgcgtggccttttaggttgaaccaatatatatcttcctttcaagagatgtaagtggtatgcaatatttctatctatctaagaatgtatgcaatatttttgtacacttaagattttagattttagaacaatacagtgcatttacatccatgcaaaacacatacccctccataaaaaaaaaccaatcctaatctggacaaacatgttgggatgaatgtgttttttttaacagagtagtatactagcatgacatgaattgtacgcatttattgctatacaacagttacagctgacaggtagacctcacacatcataaacccacatgccagctgctgttagcttgttactgctatgcactgtgcagtaatggaaaaggatatggatccatactacagtaggatactacacaatactgctatataggtggtgtttagatttaggggtgtaaagttttggcatgtcacattgggtattatatagggtgtttggtaagggtgggcagaaaaggaccgaaccgaaaagaccgagaccgagaaattcggtcatcaagtcgatcctaggcagtgaaagaccgaattttgttcggtgaatttagttagtctcctcggttaaccgaatagatcgaaaagatcgatttatcaaaaaagtgtaaatgcaacttacaatccactatattaaataggattaaactataatttttacatccctacttcttctaggcatgcaacctaataacagtcttaactcataagtgcttataatttttttttgtgatttttgtgttaaaaattttcattatttctttgcatgtatgaaaatattgttgaatttcggtcaggaccgagaccgagaccgagaccgaatttttcggtcctgacatttttgcgttgaaattcggtcttcacttttcaaagaccgaagaccgagaccgaaattttcagtcagaccgaatgcccacccctagtgttcgggcactaataaaaaactaattaaagtatctatgagcaaaccacaagacgaatttattaagcctaattaatttgtcattagcacatgtttaccgtagcaccacattggagcatttaggcttaaaatattcgtctcgcaaagtagtcgcaatctgtacaattagttatttttttagactatatttaatattttatgcaggtgtttaaacattcgatgtcacatggcttaaaattttaggatgagatacaagatacacatatggccccagctcaggtgcccattgggacaagccctggcctaggacagttgacctgtcttaagagtgtcgtactcgtgcgttgccatatgtgcagttgacttgcgccgaaacgtgcgcatggcctaccatgcattcaagtcggtcaagttgtagcctgtaggcctccgtcaagttgtagcctgtaggccttcgccgaatcgcatatatatatatagtttctgctgctcaagtcaaacggacatgctccttcacgtcgcttttcctgtacaccatgctagcagtccatccagctcgaagcgatctccgaatctcctggtccgatgtatctgactgtgcccaactagtagcagtacacaccatggtagtagtacaacacaataacacatggacggacaggctacttgggcacagcagcacaggcttcaacttggtcacaacatctcttctcgattggcacgtgtgtgaggccgaccactggcaacgatcaggggtccttgctggtaatttccctttggctacctctccatggtattcaccggacagtcaagcacaacctgacggcgaccgcgcgcaacgctagcctaactcgttaaacacctggccgtcgcggggggcatcacggtcgcttcaaggcttcgccagccgcgacgcgcttagcagcgtaaaaagcgtagcagcgccttgatccgatcgattaatatagctacccgtcgccgtccgccaaaaggccggggcggtctctttgaccacaccacgttttggcgaattcacctccggtgccgctccgcgcccgcgcgccgcgcctcgtgtactcgtgttatactctctccgtactcgtaaaggatatcgttttttaaacggcacgatctccaaaacacaattttaacttcttatttttataaaaatatttattgaaaaataatatatttatacttttatgaaattaattttaagataaatctatttatataatttttgtatttttaaactcaacaacttgtgattattcatgatttatatttctaagatttaacttaaatattgttctaaatgattttctttacgagtacggagggagtacgtctccctttatacggtcggccgggtcgccgcgtcgtcaacacgggagccccggggcctaaccccaccaccgtcacgctaccagtccagtccaccactctccccgtcgttcgccgcggcgtactccaaccaacagcgcgcaaccgcgcccgcggagtcggagtcgggaccgcacgctgactcggggtcaagcgcgcgcgacactgtggaatccaccgctcgctcacccccgcgcgctcgctcacacggtttaggccgtaagaaaaagcgtaaagcgcgcgtgctcgcgagtgcgcgcggctgtgcgcggcgtgagtgagtgggcgctgatgatatcgcgggatcgggatgtgataatatcacccccatcagagcgcgctttagcttagtactagtagggattaacatgggacaaaaaaaacaaaaaaaagagagcagaggagaattgacgagagagatagagattccttgtcgaggagcacgctgcactctgcacgcagcacaacggacttgtacgagcggcccgtggtgtgtggcgcgttgtgccgctgggatcgtggatggcatgatgccggaagcgaatttcgctggatggatggatggattcatggataggtagggttcatgagagcgatccgtcatcctcgcgcggcgcggggttcgttagttgcgcatgatgggttcgtgacaatggtattatcgcgtggaaagaccgatcatcacaggtaattagctgatttttattaggttgagaacatggtacttggtacgtgttgcacgtggtgcgtacagtgcgtgccgtccgatttcgttcgcgagaaaagtaggtagcagatatgacatatgcaggtgttgtgtttttagattacacgggagatagatgcgcgcacgtacaccaccatcacacacgtacacgctgatgcatgtactctagtttccgataaaaaatatatgtactctaatacatacttcctccgtttatatgtctagattcattaatatctatattcatacagacaatgttaaaaaatcttacattataaaacggagaaagtgctaaacagataaaggctagcagaaaatcactaatatcactgaattgatagcgcaagtgcgtatgcgaatattttatgggtataagaattttatactctagtggtagtggattaagtcatgtatccacacaaaaccactagcgtttccttcatatcattttcttttttacatacgacatatcatatcatttcaaatttgtttaagtcaaactatacaaaactaattaattagcatgcatccttttaaatatttaagggaaaattacaaaaaccaccccaaatgtcactctgagtttgagatgcctccccataagaaaatttgttgcaaatccccacctcctaattcaccttggtttgatttagacacattctctccacacgtacgtgattcatgaagaatcttgtggcaaaatcagccgagtcccactcggcgggagcaagagattatgttgtttgttctgtataagacgatcatttcgttgtgttatcatggtcatttcattgtgtttttcatggtaaactcactatatattccaaaccaaggtgcctaaatcaaaaccaaggtaaattagaaggtgggaatttgcaacaaattttcttacagggagggtatctcaaacttagagtgatatttggggtggttttgcaattttcccaatatttaattactactagatgggtgtataaaaatcatgtgtgtagaacatttgcttttaaaaatattttatgaaattataatatcattaggtttttaaaatgttttacaacagaaatgtattttgaagaacttgtcaatgtttaaaacagtatttctagctttgacgggagtatagcatggaaactgtatggttctttacaccgtagctacagtaatttgtggcgtcgaaagaataaagtaatgtccttttctaatttataatgtgaattatgtggaaatggtgaagtgtatgactacactcacctgagattaaatcttggtgcacgctaatagtaaacgcatgtgggtttgttttagttagaaatttaatgaccttaaagatttgccgttaggctatgccttttttttggtgcaaaatcaggcaattttcaataaaaacatgctgcatatacttgttttctgttcaattgttcaaactcttaaataaacacaccacttaggtaagcactactagcaatcaagcgtataccaatatattcttatcgtgtagattagtggtcttttaagttatttttcatttgaatggttgtcaggctttgtccaacagtataacttttacagccttttaagttaggttattattacctgaatgagaacatgtgtggacatatgttgtaatagtaaccacacatgtagaagaatatcatgctatttattctatattattcgtgcatgaaatttaagttggccatatgctccatgttttagttgtgaacttaaggcgataagtcgttttctgcataattgcatccggaacttagcaatacttcttgccaaggaaaatgtaatatataaagaagcaagtggatatataacaatgaagttgcgctagttcaagagaacaaaaactaatcgcttagtagtgacgtgcgttcactttatcatgacacaaagatttggagtaaaaaatgaaaaccacttccattcgtgtttgtgctgtgtcacacatcctaatatctactcactccgttttatattataagtagttttaatatttatctagtcaaacacgtttaagtttaaccaagttttttcaaaaaatatagccatattttaacataaaacaaacatattatcaaaatatatttacataatatttaataaaaataatttgtaacggcttataaatatataatggagggagtatattcataattaattcataacaaaagaattgcacaatcagttgcggttcgttcaaaataacaaaagaattaattcatggtatactacggagccatacacagtcgatcctcccagtcagcagttcagcactcatcatttaccctgttgatctgaagataaagagcatgcgtgatggggcagagcaaagaaaggccaatccaccagttgacatctcagaaccgaccggaacttcctaatctctcggcagatcagagaaagacccctagtctcatcagcttgtaagatgggaaaaaaagctgagataaaaagacgggcactttagctggactttagaaggaccagagcaaagctctcctgccatagaaaactatatagttacgtgctaacatcttgcacttgaacacgctaacctttgattagtgcactagaattgtataaaactccgttttgtcaggcggggaaacgcggttactggtatatattgacgtgtcgtcgttgcaggccgccaaaccagtaacgctatctcggagcgtgatcacgcacggcgccgccgcagcatgtacaatggtatactgatcactggttaatgcacctttgtcaaatctaatccttttacacgctttgaagtttgaacagtttgttaaactagggatcagatcgaagtagatgtttcgttaactgccaactcgcttggctacacattgcttttgtggaaacccgtgaaagctaactagcctagataggacataggagagaccacagccgtcgacttgcagatttgcagtggaagaccaacgaattaattaacacgtgtgttgatctctgcaaataggcgttgatttgaaaacttttgcatgaatattggtgtaatggtgttcgttttgctacgactacgagtagttagcccaaggtaggcaagcagaaccaatttcactctacttcctgcatattcagtcattctccctgtcggtcgtatctcttttacgagcaacaggggaacacgttgcatataaccttgcagtagaatttaattcctgcactgattaaaaagactcagcactcttactactccgtataattaatcaataaatcacatcagggcgggagagcagtcgaggcaccagaatgttgcaatgggatgttcttttactcttctctttagacctcactaaattaaccggggaccgagcaaagggcatctttgtcacagcctcacgatgccgtcctggccggctggccggcaagaccggagagccccctcgcctccacgtagagccctgtagcctagcccgtaagtagcttggtcctacacggctagcttagccacggccgggcgatcgattcagccggtttattttatctccggcgtagctgtcacggcgagtgggatcgatgcgacgcgctgctccagcccgcgcgcccacctggctcacgcattcggtccctctctctcgccacacgccacacggccctgccaggacgttcgccgtcgcacaccacgccacgacccacacccacacccaccatccgcgcgcgctgtccgctgctacgtcgacgtacggctcgttgctttctggcgaggcgcgctcgcggggagactaaactattccggcgttcaatggctgccatttcgggcaagctcccgcggccgattagtttacgcgcggcgtcgctgtcgcccgcggccacggcgcgctagtcgcgcggcgagccggcgacaggtgtcccgcgcgccggattgttaaatgggcgagggcggataaagcccagcgaccggaaagggaagggcgatccacatatgcgcacatataattgcagggcgttggctttggattgctactactgttattatttgttaagcatttgcagatgatcgagatcgagatcgcccggtttatatatgttctctgcttttgttttcttgcgatggcacgtcgattctcaagcgtctttctggtcggatggtattctccctggcgcttttgcactttgcatttctactactagaagggtcgatctcattagtattctagttttggttattattcggcgaactgaacgtgatctgtacgtatgatttgcccgtgctgcaagcgagctgctgctggttcagaggaagaaaaatattgatgcatcatgcagggctccaagccggcccagcgaaaagacagtgctaatatgcttgcgtcacgatgcatgagaaacagttctttgcctacgaccttgagttgtaggcaaaatcttttctgttcgtcccaaaggacatgatcaagaactttgctcatatatatgaatgtgatggatgataagacattttgtttggtagaacatggaacaacttcgaattaaggcatgtttagtatcctgtttccacgtcaatctcagctgtgatgcacatcctaaccgttcggctgcagcggtctggactattttgaatgcagctagttgttttgtactggctgaaaagctcctacgaccgctgttggctggctgctgtagcactgtagatactgctcagcagcgttgcaacaaccagcttttccgaaccggtcttacttatagagcaatttttttttttgaaacctaagccagcattgctggttttatattaagagagggagaaactgtacagacaagagacaacgacccaatttataagggaaatcaggcccgaaaaccatacagctgcacggttaattatggggaaccggctaaaacccaacggacagaagaaagcatgggacctaacacacaactaacaacaacagcggagcccaaatacaggacatcgttgccaagctaaacacaaaagcggcacaacagctccgacatcacagaagaggtattatcgttgccgagctagccgcccaagcgacccagcagcgccgacttcaccactgcagcgacactgaagccacaaaagtcgccaaagcgaaagcagctccgacatccacaatggacatcagccaagccaccaaagagccacttcctccacatggccagcaccaactctttggaagagactacaacacgtcatcgttgccaagcgtcgccgcaccccaacagcgagcagctccaacttcatccgcagaagcaaccgaagagtgtgtcgtccatcatagaacgaagcagacccaagaggcttaggcctcgccgaatgccaaggaaagaaagcttttgagccgaagggaccatcaatagtcatcgatgtaaggaactttcccgaagcgatgcccccaagaaggacacgacgcgtaacgtcgtcaccgctcgtccgaggccggagcaaggttttcacctggagatttgtggggcaaatggcagagcgccatgacaacgccttcaagaagggaaacggcgccaacggcgtcgtcgtcatcgaaccggccaaaggcacggcaaggctttcaccggcgtctacacattacccacacaagccccccacatcgacggccacacgatagtccacgacgtctcacaagcattcaaccctcgactcaacctatcgtcgcccacattcccctgctgcaccgactagaaccagccaaggcggccaagggaccggtcgtcgaagctcggctagccatccatgccgccggccgcgcttccacgtgctgcaccggcctctgccatcgccggccgcacaaccacgcgccgtcgccagcctccacgccgccggccgcgcctctacatgccgcaccggcctcccgctgccagtcgcgtctccacgctgccgagccggcctccacactccacgtgacgcacccgactccacgctgccgagccggcctccacgccacgccgccggccgcatctccacgggccgcgccggcctccacaccaccggcctcgcctccacgctcctccacgcgccaccaccaccagagccacgcctcctatgctcccgctgccgcctgcatccccgctgccaccgcatccccgctgccacccgcctcccctcccgcacctagctccagatccggcaatggtcgacgcggatccggtgatgcccgaggtcgtagactccgccaccgctgccttcaccaccgcggcccacaccccgccgcctccgcctgccgccgccttcaccaccgtggcccacatcccaccgccagtctctgcctccacctaccgccgccaaccccgcgcccctgcgccgcctgtcgccaccacgaccacctgccgccgtcgcccgcgcgccctgcacgcctccggcctcgacgacagcgccgctccggccggcctccaccctcagattcgcccgcgccggatctagggtggccgccgccacgagccccgccgccaccatcctagcaagctgatggctttgccggccgtttgctcaggcggcggcgaggcagaggggaggggggaagaacggcggcggcggtggcttgggtcgccgcccgagtcgcccgagcgggaggcgacgcgggggccttagagcaaattaagctccaagagtatacattcaggtatttgaaaatcaggatttagaaaatacaagaacatgatgccacacctcagtgaataatatggaaagtaaatacacaaatttgtaaaataggatgccacacctcattaaatactatagaaagtaaatccacaagattgtgaaaatgttttttgatagcactatatgaaaaacataggaatttcgagacacaaagggcttttgagtagatgtgacacatcatattactacgaatttggacaagagactatctagattcgtagtactatgatgtatctcatccatccaaaaacacttatattttagtacggagggagtagcaatttctagtttttttttccttgtaggatttccatactaaataactccttagtttttcctttattttactacttaagtcaccaaaattttggtaggttatgttttggctttaatataaaacggtatatttgcgcctctttatcctatgttgatgatcgagttaattaatctctatcccgcatgtaatataatggattctcttttactacaatcttagagccaaagccaaaaggaatccattacatttctgagcatctctacactcttctggatgtactcaagaatctacacatacatatatgcgtaaacaattcattggtggcccaagacataaaaaagaaccctagagctctagacagacatattccgctttacatatagtaggacggaatgcagtggaaaacagcacaaaataggattccagctagggaacatgaaagtaaatagaaaaattctctaaaagaaagttgtaaatataaagtaatttagcttaaagagaagctagaatcgtaaagcagacagatcgtatgccccgtcatgggtacagagaagtttaaaaacgacgatgtgcctatggatggtggggaataatgcatatgttacagcgatttaataatggagtaagtagaaaatatgcaaaggtgttcccgataagtggaaaattttgaataaggcaattgaaattagaaggtgtgcgctgaagaaatattacacccagcccatcaagcccatatactgcccaggcgcccagcccaaatcacatgaggcccatttaccatgcacgcgggagcaccgtaccaaatgtgcccaccatggccgccgtggcattgcaaaaacgggagagaaacaacacgtcgcccttctccgttcgctctcctctcatggccatccctaaaacacgccatggtcatcgacgaaccgcctgtccatttccattgccgcccctcctcctcctcctcctcctcctgcacggtagattaagatcgatgcatggtgcgatttctgcatcgggaagggcagattaagatcgatgcaacaagcagaacggctaatccgcagcgttggacgacatgcacgtacgatcgccggcaaggtccatggacacctccctctccatcgccgtcgcagccgccgccgtcgtgctgctgctcctcgtgcggggcgccgatgccgagatcaggacgacgctcatcgtgtcggacgctcggcctctcattctgttcgagcagtttggcttcgagcgtggcgggaaggcgaccatctccatacgccgctcgttttggaatctccggcgggggtcacggcgcaccgcggttgaccccagcctcatggggttcgtcctcatctccggaacccagttcccgaagatcaacaacgcgtccgcgtacgcggccgccgacccgggggacaacggcgacgacggcgggggcagttactgcgtgctgacgagcgagtacgccctcccggtgctccggctcggcgacgtcccgcccggcggcgtcaccaccaccgtgagcatcgacgacccagaccagtacgccgtcgtgttcagcaactgccaggacggcgtggaggtcaccgtcgacgtgtacaccgagatgtacaacgtgcgggacggcatctccgacgggcccagggactacctacccgtgggcctgcggccgctgccgaccatctacacggtcgtgtcggaggtgtacttcgcgttcctggcgctgtgggcgtgcgtgtgcgtgcggcaccgcgcgacggtggagcggatccacgccgtcatgggcgcgctgctgctgttcaaggcgctcaagatggcgtgcgcggcggaggactcgtggtacgtggagcgcaccggcacgccgcacggctgggacgtggcgttctacgtcttcggcttcttcaagggcgtcctgctcttcaccgtcatcatcctcatcggcaccggctggtccatcctcaagccctacctccaggtgatcaccattgatcttaattactctctctcgccattaacgaacctagaattccaggctatagaattttccatttttacagaattattgcgaattactcgttccaggagagggagaagaacatgcttatgatcgtgatcccgctgcaagtggtcgagaacctgttgctggtggtgatcggggagacggggccgacggggcaggactgggtcgtgtggaaccaggtgttcctgctggtggacgtcatctgctgctgcgccgtgttcttcccgatcatctggtcgatccgcagcatgcgcgaggcatccaagaccgatggcaaggcggcgctcaacctccagaagctcacgctgttcaagcgcttctacctcgtcgtcgtcggctacctctacttcacccggatcatcgcgtcggcgttcctcgccttgctcagctacaagtaccagtggggcgtcaacgtggccatcgaggccgccagcctcgccttctacctgttcgttttctacaacttccagccggtggcgaagaacccgtacttgtacattggcgacacggtggaggacgcggcggtcgagcgtgagatggacgacgaaggtcgattttgagcgccctcgtggatcgtccatatgatttttccccccaagttttatgcgtttcattagttggctagctgcgttaattgtgtacgactatatgtttcgtgctcgatcggagcgtcaggctcgcggattggcgtgtgcctgaaacggtgatgatgtgacgactggtgtgtctctcccttttgtacaagaaggcatgctcaacggatcgggaaattagcaacaaaattgcataatagagtgtacagcaatggacattatggactgttgttttatatcatgatctattattgattcctcggctatatatgtataattcatgcaccacaaaatatatattgacccaaaaaaaaactgaactctattatattctagtaacgtagaaactggtctcgctcactaccacatgacgggcggattgcatattcacgcacgttaactggcacccccaggctgcgtcctccccttgtttgggtatgacgcagcgatgtccgtactggacgcatggcacggagtcctcagcgcggcgacggggtcgtccccgacccgcctcgacatgcacgacacaagcgtccccaggtggacgtggcgggggtcgtagctgtggtagccactgtggatgacggtcgggatcttcaccgcgacgtcgaacgcctccgccccgcgccgcgcgtccgccgcgagcgcgtccagcgcggagcccggcaagcgcacgccggcgccccacgcgacgacgtgctgctccttcgtctcccgcgccccgacgcagagctgctccacggacccgatggcgagctggacgccgcggtaggtgacctccacggttgtaccaggccagatgcagtttgggtagttggtcacctggttctgcgaggagaggcggactgtgaggttgaacaccgggtccagcgtcgggtggtcgagatcgaggccggagacggcgtcgatcgaggcggagtaaaccagatccctggtggacacagctatgaggtaaaacaacccgccgacagcgaggccaacgaacaggagtacgatggcagtgctcacgacacggcaccagtttacaccatggcaaccgcaccgccggcgatgacggggagaccaatggtctgccggcgacgcttccatctgaatcgtcgtcgcagctggcatgcttaattcgttttccgcgcgccctggaagatcgatacgacttggtcagttttatgcggagtttcgtgaacgtttgatcactcgggaacgggcgacgtcgtacgatttctatacggtccagaattcctgatctcctgattcctatacacccgaagacccgcagtccaaggatttcgaggatcaagctcaagatctcgagcaaggcaagccacctttgaacatcttgagcctatatttgaacttaattatgttgcttgaaaaatattatgcattaataggatcgcacttaatctgtttgtcccgtctgcaaggcagaatggcagcctacctaatttgttgcatttgatccttccttcgttaattgttataccatgttcccttgtaaccacccagttgcgcctcggaaatcgtgcactctgcacgagtatcgacggtcgccttcaaacttaaaatatgataaacatcttgggtaaaacttgggttttacaaaagacttggaaaacccgacacctgggtcggtgcttgcgaactaaatgaattttccaaaaccgcggaccggggaacgtaccgggtgtacggtttcccgctcttgcacctaaggaccgtttccttggaatttcatccgaacataagacaagtacgaccacatgggtggaatgggacacccctggctgagtaactagcttatcaggggagccttgatgccgagagacatgtggattcgccggggtagtgtcggggaggacccctgggcttcctggcacagtatggtatgggacctaacctgttgttggtctgggacccctctcgtcggcatatggtaaacctgtgtcggctttggaaatgccttgtcatgaaagcttggaggtctcccgacgtggctgatccccacgggctgggtgatccgggttagtaatgtcgtgtgggtaaagtgtaccccctctgcagaggttaacaaactgttcgaacagccgtgcccacggtcatgggcggatgtgaggtgattcctagcatagttttgtttgactactgcttgtgaaattgctgttgtggaaaggggatcgatgtttggaaaatctgcagctgatgggatcagctaggcccgggaggccgtttgaaagttgttggcccgggtggccgtttgaaaattgttggccgggtgccaatcttgatcaattcaaaagactgatacattgcacatactccgaccggacgagacgcactgtctcatccgtgtcgtttgagaagcactcacttagttgttttcagaaaagagatcaaataaaatcaattgcaaaaacaacagcctttccttgaagcttgcattaaacacttatttcctatggcttgctgagtactcccgtactcacccttgctctatataaataatcccccccagttgctgaagaagatgaagcggatcccgctacgatgagttttagggtttcggcctagttcccaagtcgcgcctgtgttgtttggtccgagtcttggcttccgcttcccttttgaaatgcagttgtgagctcgggatctgtccgcagcccaacatgactgtacctctactctataataaagagacctctgttgctgtgatattctgtcttcctgtgataccagcactgtttcctaggactggtatagattaacaggttaatttggagcgtcacgggctagttccggtcgggactagttaggggcgtgacaagagatggtatcagagcacaggcttgcccctagggcgaaacccgacgtttaggacgaccctaagggtactaagttcaaaactacttgcgaaaagctaaggctttttttggtttccttattttcaatagtttgtttctaaaatggttactgatcttttctccctctttcaaaattgtagatggcagtgaacgccagcttcagttcccacggttttggtgagggtcaccatgtcgctcagcttcgagacctcgcccgcttccttggcttctcgtgtcccgagtacacggggtactccgtggaccgtgttccccctcgctgtgagctctctgtgtacctttaccctcgtggaggtatacacggagctggccttcgcccacaccacttcactgtggccaggcccactctccagatcgcgtgccaggacctctcctggactgcgcttcgtcgcttggcctacgactacagccaccgtctcgggggctctgccttccggcagcttccacgccttccttctggccacgcaaacgccaggtacccttgtccttacagtgagtttcagccagtgctgactcgcatggttgagctttcggaggctcaggccactcagcacgacctactccttgaggcttaccgctcccttgcccgccgctacgccgctctggaggcccgtctggccgaggagggtgtcacctcagttgacactgtctcttgggactcaggtcgcctctaccacgccagccacctgtcctcccacagctcccgcggctctgctcgcactcccagtggcctgcgctcccccagctcgcgtgcgccgtactcaccagtgtactccccctaccctcacccagttagcccctcctacacccctggacacaccccagttgcttcctcccaccgtggcccacgctttatccgcactgcgcggaagcgtgttgttggttcttccaccgtgttccgtttcgactacccagctcccacaccgccagcggcccgtgctgctgtcggccctcgacaggttccgccggtcccttcgcgtcagccgatcgacgtttcttcgactgaggagccgactacaggaggcagccaggcagacgaggagtagaggaggcagtcttcagcagccgtccgtgtgttaggcccttttgttccgccgccaactcttttggagtcgtggcgaggtagtgcgtgcgtgtgtttgatgtgggtgttgtttggtagtccggttctcctaggtggtgtgcgcacagtcaagctcggcgtagctctgtgacttgtccacacccgttgtattaggtgtttttatgatttgaaaaatccagtttatgcctagtgtgtgctatctgagttgctatttactttgctccttgccctcctaagtgcttatctgattcttacctcgccctcatctgggagtttagatggctagccgcccccgccgtgctgctcgtgcaccagcccgctttggttttgaggaaggtagagttgagccagaagcaaatcatgagtcagctaatgagcagtctcaccacagcaaccgttcgcaccgtactacttcccgcaacgcagaagttgagcaaccccgccgcagcaaccgctcgcatcacacagcttcccgtaatgcagagatggaacagtctcaccgctctcaccgcactgccagtcacaattctggagaagaacgcctcccttccccacctcatgtggaaaacaacatgcaacacttaatggcagttcagacacaaatcttgcaaggattagccgcagccgtagccggttatcagcacaatgcgcatggaaatggccaccctcacatgggcaacaatagatccaatctaacagactttctgaggtctcgtccgccagagttctctcagaccgtcgagcccgtcgaggctgacgattggctgaaagatgttgatagaaaactcaacttagtgcagtgtactcctgttgagaagacgctctacgcctctcaccagctaaaaggacctgctgcagattggtgggagaattactgcaatgcacaccctgaacccactaacattgcttgggatgagtttgctacggctttccgtgcagctcatgtgcctgaaagcaccattgatatgaagaaagaggaattcaacagacttaagcaaggcaacaacagtgtcaatgagtacctaagtatgttcaacaagttggctcggtacgcccctgaggaagtggacacagacaagaagaagatcaggaagttcttgaagggaatcgcagtaggaatgagactccagttgcttgctcatgacttccccacttttcaacatatgatcaacaaggcacttctacttgaggatgccagaaaagaggctaccgaagaatacaagaaacgcaagtctaaccatcagggaaattcttcccgaggcgcacctcgccctcgctatggtcaacccatgcaataccaccagtcggtcactcaggctaaccgccagccaggctacgcccctcgtcctcagatgaaccgtccggcacctcagccacagcagcgtgcccctagtggcaatactgcaccaaacagtgttacctctttcaagtcaccgctaggaccgtcagcagttcagtgtttccggtgcaaccagatgggtcactatgcccgacagtgccctcagaatcctaccaacaccaactcagggcatgctaatggcagcactgccagaactcctactccagcggcagctcagtctcgtcctagctctcaggcaagtggacaaggctctcgtgcttccaacaactttggtcgaggccgggtgaaccacattcaagctgagaccgctcaggatgctccagacgttgtgatgggtatgttctctgtcaactccgtacccgcaatagttctgtttgattcagaagcttcccattctttcatatcacaagcttttgtgaaaagaaatggttggaaaacccaaaatttacgtgtaccaatgatagtacattcccctgggaggaatataagggcaactcaaatatgcccggaagttaaccttagaattgaggaagttgacttcctagccaaaccgatagtcctagactcgcaaagcttggacatcatcctagggatggattggttggctaagcacaaagggcagatagattgtgccgaaaagtccatcaccttgcaaggacctggaggaaagcaagtccgctttacctctaacacccctaccgcgagtcggtctatcctaacctgtttacaagtcacctccttggagtcggtgcccatagtctgtgaatatcccgacgtatttccagaagaattaacaagtatgccaccagaccgagagattgagttcgccatagaactggcaccaggcaccgcaccaattgcaaaaagaccctaccgaatggcagctaatgagttagcagaagttaaaagacaaatcgaagaattggagagtaaaggttatgtgcgacctagctcatccccttggggagccccagtgctcctggtcaagaaaaaggatggctgtgagagaatggtaatcgactatagagccctaaatgaagtaactataaagaacaagtacccgttgccacggattgacgatttgttcgatcaacttaaaggagcaagagttttctctaaaattgacttgagatcaggttaccaccaattgaaaatcagatctgaagatatcccgaagaccgctttctcaacgcgttatggtctatatgagttcacagtgatgtccttcggactcaccaatgctccagcattcttcatgaacataatgaacaaaatcttcatggaatacctggaccagtttgtcgtggtgttcatcgatgacatcctgatatactccaagaatgaggaagaacatgctgaacacctgaggctgataatggaaaagctcagggatcatcaactattcgctaaattctcgaaatgcgaattttggttagaccgagtagcatttcttggacacgtgatctcccccaatggtgtcgaagtagatcccagcaaggttgaagctgtacttgcttggaacccgcccacgaatgtgtcagagattcgcagcttccttggcttagctggatattatcgaagattcattgaaggattctctaagctagccagacctatgaccgagctgttaaagaaggaaaagaaatttcaatggtctacagcctgtgaagacagctttcaagaaatgaagaaaaggtttaccactgccccagttctcaccttgccagatatccgaagagatttcgagatcttctatgatgcaacaagacaaggcttaggatgtgtcctaatgcaagaacgaaaggttgtggcctatgcatccaggcagctcaggcctcatgaagtcaactatcccacccatgacctcgagttggcagccgtggttcatgctcttaagatctggaggcactatttaatcgggaacagatgtgaagtatacaccaatcacaaaagtctcaagtacatcttcactcagaccgagttaaatatgaggcagagaaaatggttggaactaatcaaggattacgatcttggaattcattaccaccccagtaaagctaacgtggtcactgatgcgctaagtcgcaaggcctattgcaatgtagctcaaatacggtcttaccaagatcgcctgtgcagagaattggagaagttaaggctgaccgtggtacagtcaggtgtccctgccagcttgacagtgcagcctaccctagaatcgcaaatccgggaggctcagaaagatgacgaagggataaaagaattaataaaaagaatacaggagaagaatgacaccaatttctccatagacgatcaaggcacagtttggtgcggtccacgcatctgtgtaccggccaagaaggagttaagagatctcatcctaaaggaagctcatgagtccgcctactccattcatccaggaagtacgaagatgtaccaagatatcaaggcatacttctggtgggctggaatgaagcgagatgtcgcagaatgcgtagccttgtgtgacatttgccaaagagtcaaggcagaacatcagaggccagctggtctgctgcaacccctaccgattcccgagtggaaatgggaagagatcggaatggatttcatcaccggtttgccaagaacccctagcgggtacaactccatctgggtaatcgtggaccgactcacgaaatcagctcatttcgtgctagtgaaaaccacctttgatggaaagaaactagcagaactctacatgacccatgtcgtgtgtagatttggctgtcccaagaaaattgtgtcagaccgaggcactcagttcacctcaaagttctggaagcagttgcatgaagccctcggaaccgatctaaatttattacagcctaccatccgcagaccgatggtcagacagaaagggtaaaccaagtcctagaggacatgctacgtgcgtgtgccctggatttcgaaggcacttgggatcgttgtttgccgtatgctgagttctcatacaacaacagttatcaggccagcattcagatgtcgccgaatgaggcaatgttcggaagaaagtgccgcactcccttgtgctggaatgaggtgggcgaagcactggtattcggtcctgacgtactcaaggcagcagaagaacaagttaaactgatccgagaacgtttaaagacagcgcagaaccgtcagaagaattacgcggacaatcgaaggcgtgaccttgagttcgaaaaaggagatcatgtgtacctgcgggtatcgcctctccgtggtataaggaggtttgggatgtccggcaagttagcaccccgctacatcggcccctacctcataaccgccagacgtggcgaagtggcttatcagcttgagttacctgaaggtctcgcatatgtgcacaacgtgttccacgtatcccagttaaagaaatgtcttcgagttccagaagagcaagtccccctgggtaatatcgagctggaaaagaatctgacctacaaggaaagactgatcaagatttttgaagaggcagaacgtcagactcgaaggaagaccatcaagttctacaaagtccaatggagcaaccattctgaagatgaggcaacctgggagcaagaagatcttctccgcgccgagttcccggagctgctcccttaggtgctgaatctcggggtcgagattcttgttaggggggttggtctgtagcgcccgttccgtcgtggcgcctagcgggaaaaattatctcttaaaaaccctatttgcgaaatctgtttctttgcttgttgtctagtgttcgtgccatctcagatctcaaatccccgatctatcatcgagttcaatcccgaatccaaatctttcccaaatcaatccctccgcaaaagtctattttgcctccctcgggttcgatgggccgaatctctctcggcccatctccccctccctccccggctctctctctctctctctcgctatctctctctccctcttctccgctctgcccgcgcgccgcgcgcgcgtgcgcgtgagccgcgccgagccgagccctccctctccgctccctcgctgccgctccccgcgcgccgttgttcgcgtgcgcgcgcccgcgtggtcgccgcccgtgccgcgcctgcgccgtctgcgccgcccggccccgccgccctgccgcgcttgcagccgcgcagccgctcggccccgcgagccagcacgcgtgcccgagccgcgccgctcaaaccgccgcgccacccattgcttcccgcgcgcgcgtgccatggtggccgaccgcctggtcgccgccgccgtcagcctcagccgcgcctgtccgcgcctgccgcccgtgtcgccgctccgctccaaaccgccccgccgtcatcgctgttgtcatcgactcggccccgcctctccccgcgctagcttccaaggaaatgaggcagagctcctcctccttctgccgcgtcacccccgctccctcctccttttcccaaagcggcaaggaggcaagccccctttccctcttcctttcttcttttcctcctctcgccggcgtcacctcctgtcgtcgttttggccgctagccgggcgccagctcgccggcttgaccgtccaatgtcggttcccctctcccaaaccgacattgtcgcccctataaacccaagctcattcctcctccaatctccctctttttcgtctctcgccgccacgccattgtcgccgcctcccgtgctctgttcgccgtcgccgttcgtcgttgcacgtgtcggaggagccggcacgagcaaggacgcggaaggggactccgggcgcgccctccccctcctcttcctcagcccgaggccgaaacgatcacgtttcgcgccgtcggctctcgtaactgcgcccgcccgcacggtagtgcctccctccgttcttcctcctcgttccatctcctccccttagactcgggtagtagcacgagtagcctccccgtagctagccggcgccgccccgaccgttgccgccgctcgccgtgtgctcgccgccgtcgccgcccgagctcggaagcgcctctcgtcgccggcctcactcgatgcgtttcctcctaatccggcgcaagggacggattcccgtagccgcgtagatgctctcgccgccgggaatcggccccccgtgacctcgtcgccgttttccccttttccctccgccggttgccgccgccgcaatccgccgccgtcgagctccctccggcgaatccgagccgttggctcgactcccctcgtcccgtgcaaccacccggtgtgctcgctttctcctgtatcgccgtggttcgctccgccgctcgccgctgttgtccgccgtccgttccggccggcgtcgtcgtctacctcccgccggcccgcgtggcagccacgtaggcgccacgtcggccccagctcggccaagaccgggtcgagccgaccccggtcagccgctcccctcggccccgctcgcgggcgcggtccaccgcgagcggtgaggctgcgcgtgggcccgccgcatccgtgtcccccgcgaactgcgcgcgtgcaccgcgtccctcccccaaaccctagcgcgcgccgggtgcgcgttccgcacggtgaaccgtgtcaccgacaagcgggtcccactcgggaccacgcgaggtgagcccggtccaccggctccctctctcctccccgcccgcgcgcgcgctctgggtcgccttgttgggccggccggcccatttagctcggcagagccgtcccttttctctcgggccgcgccctagccgcccgagggaagtctaatttttccccctccttcttttcttttcttttctttttcaaaaaggatttaaataaatccttttcctttagaccaaaaatccaataatcttagaaattcaatatcttcccaaccgtaggtccgtttgactccgttcaacttccaaaattcctaatctcgagatctatctaatggcacgcttagaggtaattaatagagctttattttcgccgtttattgagttgtcctgttttgcgtatagtttcggagcccgaagacccgcagtgcgaggatttcgaggatcaagctcaagatctcgagcaaggcaagccacctttgaacatctcgagcctatatttgaacttaattatgttgcttgaaaaatattatgcattgataggatcgcacttaatctgcttgtcccgtctgcaaggcagaatggcagcctacctaatttgttgcatttgatccttccttcgttaattgttataccatgttcccttgtaaccacccagttgcgcctcggaaatcgtgcactctgcgttcagacaggaggcaagcactgtcacgaccggaattaacccaacgggcgttccttacgtgcgtgtattattccttgtcccaggaggcaaggtacaccaagagttgatacatttcagagtatatcaagcggaagcgtaaatagttaatttattacatgggcgacgaaggcccagcacacacaaagacaaacgggaaacagcggaagactagggcgacgaccacaggcgcttgacggtaggcacgagctagacactaaagccttcatcttccagaggctcctcttctgggtttgggaaaaattgagcaagactgagtacaaccaccgtactcaacaagacacacccacaagtgcagaataaatgcaagggagtacaagggaattagaatataaagggttagggttgcagtaaacggcatttaaagatatttagttgctcaaagctattttgtagacacgattctagaactatacattattatttatcaaggcggcgaacccacacgaacctgtcttaacccaaggcctacgatgattcagaccgaactggcaacccgaccctgggtcccagctcgtcccaagccaatccaggccaaccattccacattttagttgttaagcaggttttaagaattaaaacactaacttgggtacattgctcggcttgcccataaccgagggcgcggctattcgaataggttatactctgatcagaggtgtacatctttacccacaagacacatcttcctcacgtgcaaccacgtgccacataccaccacggtatacagacggaagacgtgacatagtttccaacccatcctagccatagacaagagtaccgacccaatcccacctacggccggaatctccgggacaggtaggcaggactgagcccctagcagcaggacaccggccctgtgccatgacatctcgactaccgggccgcagctcgtgtagccttcatttgccctagagatgtccatcgacccccgacttcgtccatctccatccgtgtacttttgtttataaccagactgagccacaaactaagccttacccactagacatgtggaagtacggtagtgctttgcaacagaggcccgaagaccggtccttatatggccgaggtgctactatcaaaaccatgcaccccgagcccagcctaaaaccattttggggattttgaatagagggggaggtgtgaatccaattccacaatactccaacaattccaaagtgtccaggtgatatgaatatcccaaagtctagagttgtaaaaccgcctaatgttacctaattaaatagcgaagcatctacctaaaatcatactagtggtaccatgagtagaatgtccactagttggggttttgtttattctagggtgaacaaggaaataataacaataacaataataaggtcataacaaaggtaaataggcatggctaaataaaacagtgattacgcgggaatttaaataaagcgataatgcaataatttaaatcaacatatttttataaactgggattcaatatgttcaaggatggtgtgacttgccttgctcgctttcccaaacgccggcttcaacttccacgaagagcggatcttccgaagctgcagcgtctacacgaccaacggaaaagaaaaggctttcactctaataaactccatataacaagcaggaacaaagcacaaaaataggttcttgacttcttaaggaaaaattagagacttgaatggtccaattccgagttcaaatggccaagttatggccatttgaagtttatatgctctttaaatgaatatttgcgaatttcttcatttaaaatttaatttaaaaatggatttattgcgtcagccgaggggaggggcgcgcggaccgggtccacgggagtggggcccacgcggcagcctcacggtccacggtggaccgggcgcacccgggctcgcaccgggcggcgccgtgggccccacgcgtcagccgcacccgagggcgcgggcggctgacagccgggccccacgcggcagccgcacggtgcgcccgaaggcggccacgccggcgcagcggcgggaggcggcgcgcccgcgcccctatggtcgccggcggcggccataggcacggcggagcggcggccgagagaggggaaggggagggggaaaagaagcggcggtccacggctcaccccgggtcgacggcgacgacggaaacggcgaccggagcggaggaagacggcggcgcggctcgggtggacggggtcgacggcgttccggcggtcggcgaatgaaacggaggggtggacgaggtcgccggggatgcggtgaagccgaaggtggcgacgccgaggcgggaggtggtccggggcgacgacggcggcggaccggtgctcggcggtgacggcggagagagagagcgatggcgcgagctcgattccgacggggagagagggcggcgagtggcggaaacggtggagggaggcacggggagtgtttatatagggtcgggagtgagagagagcggccggacgaggaggaaacgggcgcggaagatccggccgccattgatggcgccggcgaggttaggggagagatttccaaacgaatccgagggagagagggagggaaaaatagggggaaagagggagggaataacggggaatatttcccccctcttgattgcacgcggggtggacgggggcggcgggattcgcggcggcggcggcggcgctagggcgcgggcggggcggcgggagcggcgggaggaaggggatgacgggtgggccccacccgtcagcgagggtggcgggcgggcccgcccgtcagcggcgcgcgcgcggggaggaggccgaatgggccgcggggagaggagagggagggatagagagctgggccggaccggccgaagagggagagggggagggaaagggaactttttagggtttttccttttataaaatcattttaactttgtttatttcttaataattattatttgtgctctgaaaattccactaaaatttatttacgcattttaggctattaggaaatatacaaaaatcctccaagccttatttgacttttaactttgcacattttaattgtggaggctttcacatggattttaattattctaggcataaattcgaggatgtattttagagtcgttttgggacgcgacaaacctaccccccttaaacggaatctcgaccccgagattcggaagaactggcgaagagatccggatgggctgccttcagctcgtcttcacgctcccaggtagcttcttcctcggcgtggttgctccattggaccttgcaaaaacggattacccggttcctggtcctgcgctccatggtgtccaggattttcactggcctctccacgtaggtcaagtcttggcgaacttcaatttactctgagtcggcctgctcggatggcactcgaagacatttcttgagttgcgacacatggaacacatcatgcacgttgcccaaggaggcgggcagctccaactggtaagcaacttctccgcgtcgagcaatgatgcggaaaggacccacgaaccgaggtgcgagcttccctttcgtctgaaacctgtgtacacctcgcaatggcgtgacccgaagatacacaaagtcatccactgcgaattccaggtcacggcgtcggttgtctgcataactcttctgccgagactgggccacctttagattatcccgaatggttctgactttagcttcagcttctctcaggatatcagtcccgaacacttggctttccccaacttggtcccacaatagcggtgtccggcatttgcgtccatacaacgcttcatagggtgccatttgtatgctggcttgatagctgttattgtaggagaactcggcataggtgagactcttatcccaggtcttcccgaaatctaggacacatgcgcgaagcatatcttctaggatctgatttagacgctcggtctgtccatctgtctgcgggtgatacgcggtgctgaaatttaatcgggtacccagctcttcttggagcttcttccaaaagtgagaggtgaattggcttcccctatcagatacaattttcttaggaacgccatggagactcacgatcctagcgaagtagagctcggctagtttgttccctccataggtggttttcacaggaataaaccgagctaccttggttaatcggtccacaactacccatatagaatcatatccaccttgggtttttggaagtccggtgatgaaatccatcccaatttcatcccatttccattctggtacttggagaggttggagaagtccggccggtcgttggtgctctgccttgacacgctggcacacgtcacaaagggccacgaactctgcaatttcccgcttcatactaacccaccagtatttctctttcaagtctaagtacatcttcgtgctgccagggtggatggaataaggactctcgtgagcttcctgaagtatcagctgtttaagttctctgacatctggaacgcatacccgatttccgttccatagggttccgtgttcatcctctgtgaaaccagcggctttaccctgtttcatattcttgaggagtccacgcatgtccggatcgttcttctgagcctcgcggatttgatcgagcaaggaaggcttggcttccagcgtagccaagaatccacgactaactatgcttagattcagggcttccatctgttgattaagttcgggtggaatgccacggacgacaagagtgttgcaatggctttttcgacttagagcgtcggctaccacgttggccttaccaggatgatagtgaattcccacatcataatccttgatgagttctaaccatctcctctgccgaagattcagatccgactgggtgaagatgtatttcaaactcttatgatcagtatatatttcacagcgattcccaatgaggtagtgccgccagatctttagagcatgaaccacagcggctaactccaaatcatgggtagggtaattgccttcatggggccgtagctggcgtgaggcataggccaccacatgaccttcctgcatgagcacgcaccccaatccttggcgcgaagcgtcacaatacaccatgaagtccttgcgagtatccggttaagactaacactggcgaggaaaccagcttttctttgagagtttggaacgccttctcgcattgcgggctccacacaaatttctcttctttcttcaacaactgtgtcatgggtcgagcgattttggagaagttctcgatgaacctccggtagtatccagccaaacctaagaaactgcgaatttgagtgactgtcttgggttgcttccaatcggtgacggcggtcactgtttcggggtccacagcaactcctttagcagatatcacgtgccctaagaatttgacttcggacaaccagaactcgcacttgctaagtttggcatacaattgatgttcccgcaactttcccaacaccagacggagatggtgctgatggtcttcctctgattgtgagtataccataatgtcatcaatgaaaactacaacaaacttatccaagtattccatgaacactttgttcattaagttcatgaagaaggcaggagcattggttaaaccgaacgacatcaccgtgaattcatacagtccgtatcgcgtggtgaatgcggtcttcggaatatcttcttcacggatgcgcaactggtgatatccggaacgaagatcaatcttggagaataccgtggcacctttaagctgattgaacagatcatcgatccggggaagagggtacttgtttttgatggtgacttcattgagagctctgtagtcaacgcacatcctcttcgtcttgtctttcttctccacaaaaatcacaggagcaccccagggggaagtactcggacgtatataccccttttctttcaactcttccaactgtttcttaacttcggccagttcatttgctgccatacggtagggtcgcttgtacagaggagtggttcctggagcaagatctatccggaactcaatctctcgcttgggcggcataccgggtagttcttccggaaacacgtctccgaactctttgacgatggggatttctgacagtcctatctgatgaagttctaaactactgacagaggttgggggtgcaaagaaaacaaccggttgttccggccctcggtacagagtgacagtgcgtctcgcgcaatccactactccttggaattgagccaaccaattcatcccaaggatcacatccaagttcttggtgtctagaagaatcagatccgaaggaaaaggaattccctgaatttctataggaacagcagggctataatactttgctgtcataacccctccaggggtggtgatgagcggagggttcctaagcctttctacccccaactgatttctccccacgaatggcacagatataaacgagtgggaagctccagagtcgaacaaaatggtagcagggatggaatgaatgaggaacgtaccaacgatgacgtctggagttgtcagcacgtcctcggccgtcacgtggttcacacgaccccgaatgacatccttaccaccgttgttggagcggggaggcgcttggccttgctggcgcctcggctttgggcatttatccgcaaagtgcccaggctcgaagcaattgaagcacagacgctgcggaccttgaacgtccctgcggccttgaccagactgcgcggctgtcgtaggaggacggggcgcacgggtcccttgctgactctgctgttgttgcggctgtgggatgcgcaccacgaattgaggtcggggcgcggagcgaggttgttgctgctgttgctgctgcgaggacgatccccctggatagggattggtgtagcggatcctttagttagctccctgttgattgcggaaattcgccaagcggcgcttgtgcgactccagttccttgtgcttggcttccaagcggatgctcttgtccaccagacgttggaaatccggatagtcaccggagactagacgcacggacagctcagggtccattcctgccaagaacttctcctgcttttcctcatcttcccgtacatcctccggggcgtaccgggccaggttgttaaactcatgcaaatactccatcacggagcggttgccttgcttcaactctcggaattcccttttcttaagggccatgactccggcgggcacatgggtcctccggaaggcggcggtgaagcgggcccaagtaataggctgcccctctggctgcgtagcctggaaatggtcccaccatagagatgcgggcccctgcagctggtgggcggcgaagacgactttctcctcatcgctgcactgcacggtgtctaactttttccccacggcatgcaaccaatccaatgcatccacggggttattggagctagagaaggtaggtggacggatgcggaggaactcggcgagtttagagtgttgtgggggtggtggtggagcattatgttgtggcggattttggatgtggtggaggaaagcagccatcatgttggcctgctgggctaggatttgggtgaggatggcattggtgtctagtggtggtggtggaggcggaggaggaggtggaggtgggctgccatggttgttgtggttgctgccttcaggttggttgccatcaccggtgttagcacttctcctggtcgtcaccatctgacaaccccacacagatccagcaaacagagagagctgacaattaaagctaaccacccacgactaccataattcttgaatttattactgctattaaattggttcattaaagttcaagttgcttaggcaaataaaataaagacaggctctgacacagttataccacacaccggcataaccatgccccacacggctccaacaagaagacaaacgagaaagaacacacgcgcaagcctactaactgctcgtctaccgctgcgacgggccaggacggaaggtgagcaacagcgcatcctccgtgctaccaacgcctgaggcttccccctcctgaggaaccacgggcgcgggctcggcacgaggggtctcgacgaagcaggtccatgccaaggactggcgaacaagctcgggcctggaggtactcttgcgggcggtgatcttctggctgcggcagacgcggcgacgcttggggcgacagacctctccctgggcgatcttgagctgatgcagctgcgcctccactgcgtctaggtccttcttcagctgcagattctcctgacgcagctccaggatcttcatgctgttctcgaccatcccacggcgcaccatctgatggaagtcgatacgggccgcgtcgtacgcctccaccatgcgcgccagatgcatgatggtagcgtcatcctccgagctagcatcccgaaaggtggcgtggtcgcgggctcctccgcggcgagggtggtagcggtagggcgagtgctgcaactcgtccgggtagcgctggtgaagagtgccgatggcgaggagagcggcgttctggcaagcggcggagaaagaatctccacccgcggtgactgccaacgaagtcctctcgggagagccagtgaggatcactgcagtaacctcccaagcagcgtggggctctgcatcgtcaccctcctgctccgggagctgcctgccctggtagtccactccatgcggataccccaggacaacacacatgccccgcagctccaaaacaaagccagtcaggtccagaccacgacggttgatgctgccggccatctacaaacaaaaacaaaaagaaaagcaacattttaaagatcagattttggcgataaatgaagcggcaagacagagagagactagaggattttcacaaataagacaggatttttatttttgaaaatattgctaaggcttgggatctacggctcgtcctagggtcaagggtggctctgataccaacttgtcacgaccggaattaacccaacgggcgttccttacgtgcgtgtattattccttgtcccaggaggcaaggtacaccaagagttgatacatttcagagtatatcaagcggaagcgtaaatagttaatttattacatgggcgacgaaggcccagcacacacaaagacaaacgggaaacagcggaagactagggcgacgaccacaggcgcttgacggcaggcacgagctagacaccaaagccttcatcttccagaggctcctcttctgggtttgggaaaaattgagcaagactgagtacaaccatcgtactcaacaagacacacccacaagtgcagaataaatgcaagggagtacaagggaattataatataaagggttagggttgcagtaaacggcatttaaagacatttagttgctcaaagctattttgtagacacgattctagaactatacattattatttatcaaggccgtgaacccacacgaacctgccttaacccaaggcctacgatgattcagaccgaactggcaacccgaccctgggtcccagctcgtcccaagccaacccaggccaaccattccacattttagttgttaagcaggttttaagaattaaaacactaacttgggtacattgctcggcttgcccataaccgagggtgcggctattcgaataggttatactctgatcagaggtgtacatctttacccacaagacacatcttcctcacgtgcaaccacgtgccacataccaccacggtatacagacggaagacgtgacatagtttccaacccatcctagccatagacaagagtaccgacccaatcccacctacggccagaatctccgggacaggtaggcaggactgagcccctagcagcaggacaccggccctgtgccatgacatctcgactaccgggccgcagctcgtgtagccttcatttgccctagagatgtccatcgacccccgacttcgtccatctccatccgtctacttttgtttataaccagactgagccacaaactaagccttacccactagacatgtggaagtacggtagtgctttgcaacagaggcccgaagaccggtccttatatggccgaggtgctactatcaaaaccatgcaccccgagcccagcctaaaaccattttggggattttgaatagagggggaggtgtgaatccaattccacaatactccaacaattccaaagtgtccaggtgatatgaatatcccaaagtctagagttgtaaaaccgcctaatgttacctaattaaatagcgaagcatctacctaaaatcatactagtggtaccatgagtagagtgtccactagttggggttttgtttattctagggtgaacaaggaaataataacaataacaataataaggtcataacaaaggtaaataggcatggctaaataaaacagtgattacgcgggaatttaaataaagcgataatgcaataatttaaatcaacataattttataaactgggattcaatatgttcaaggatgatgtgacttgccttgctcgctttcccaaacgccggcttcaacttccacgaagagcggatcttccgaagctgcagcgtctacacgaccaacggaaaagaaaaggctttcactctaataaactccatataacaagcaggaacaaagcacaaaaataggttcttgacttcttaaggaaaaattagagacttgaacggtccaattccgagttcaaatggccaagttatggccatttgaagtttatatgctctttaaatgaatatttgcgaatttcttcatttaaaatttaatttaaaaatggatttattgcgtcagccgaggagaggggcgcgcggaccgggtccacgggagtggggcccacgcggcagcctcacggtccacggtggaccgggcgcacccgggctcgcaccgggcggcgccgtgggccccacgcgtcagccgcacccgagggcgcgggcggctgacagccgggccccacgcggcagccgcacggtgcgcccgaaggcggccacgccggcgcagcggcgggaggcggcgcgcccgcgcccctatggtcgccggcggcggccataggcacggcggagcggcggccgagagaggggaaggggagggggaaaagaagcggcggtccacggctcaccccgggtcgacggcgacgacggaaacggcgaccggagcggagaaaggcggcggcgcggctcgagtggacggggtcgacggcgttccggcggtcggcgaatgaaacggaggggtggacgaggtcgccggggatgcggtgaagccgaaggtggcgacgccgaggcgggaggtggtccggggcgacgacggcggcggaccggagctcggcggtgacggcagagagagagagcgacggcgcgagctcgattccgacggggagagagggcggcgagtggcggaaacggtggagggaggcacggggagtgtttatatagggtcgggagtgagagagagcggccggacgaggaggaaacgggcgcggaagatccggctgccattgatggcgccggcgaggttaggggagagatttccaaacgaatccgagggagagagggagggaaaaatggggggaaagagggagggaatcacggggaatatttcccccctcttgattgcacgcggggcagacgggggcggcgggattcgcggcggcggcgggagcggcgggaggaaggggatgacgggtgggccccacccgtcagcgagagtggcgggcgggcccgcccgtcagcggcgcgcgcgcggggaggaggccgaatgggccgcggggagaggagagggagggatagagagctgggccggaccggcccaagagagagagggggagggaaagggaactttttagggtttttctttttataaaatcattttaactttgtttatttcttaataattattatttgtgctgtgaaaattccactaaaatttatttacgcattttaggcttttaggaaatatacaaaaatcctccaagccttatttgacttttaactttgcacattttaattgtggaggctttcacacggattttaattattctaggcataaattcgaggatgtattttagagtcgttttgggacgcgacaagcactcacttagttgttttcagaaaagatatcaaataaaatcaattgcaaaaacaacagcctttccttgaagtctgcattaaacacttatttcccatggcttgctgagtactcccgtactcacccttcctctatataaataatcccccccagttgctgaagaagatgaagcggatccctctgatgacgagttcttctaggagcaagccggctacgatgagttttagggtttcggcctagttcccaagtcgcgcctgtgttgtttggtccgagtcttggcttccgcttcccttttgtaatgcagttgtgagctcgggatctgtccgcagcctaacatgactgtacctctactctataataaagagacctctgttgctgtgatattctgtcttcctgtgataccaggactgtttcctgggactggtatcgattaacaggttaatttggagcgtcacgggctagttccggtcgggactagttcggggcgtgacaaaaactcttttatatttgacaaagtttattgaaatatttagcaacatctataataccaaattagcttcattaaaagaagcattgaatatattttttaaaaaaaattgttgttttgtgatagaaattttgttatactttttataaatatagtcaaacttaaaaaaagtttaataaaaaacattcaaaacaacttataatatgaaatgaagggagtatataaatagtgataaaatttgataagataatttaatatgtaatatcaaatacggatacgtatttgcaaaagcaaaggaaattaaaacccgactcatacacgaatgacttaccaaagtaccggtaaaatcatcttaaaattttataatagtagagaagagatagagattttgattttttttctagtaaaactcttttatatttgacaaagtttattgaaatatttagcaacatctataataccaaattagcttcattaaaagaagcattgaatatattttttaaaaaaaaattgttgttttgtgatagtaattttgttatactttttataaatatagtcgaacttaaaaatgtttaataaaaaacattcaaaacaacttataatatgaaatgaagggagtatataaatagtgataaaatttgataagataaattaatacagtatgtaatatgtcactatacgtaaaattgacttatacaaattgtaaaaaaaggaatactatgaacacacgtagagtagttaagagttaaattttctatttttgttacaacttatgtagatcaaatttacactgtacctttttttaataatggaataacattcggcagaacttgcatgtttgtgtggctatcttaccaagttttcttacatttttttataaccatttagataatatgtaagatcgagggacatgactctcgaaggattagaatttatttctgtagtcgcacgcattgcaaatatatcctctttgtttgaaaatataagagattttggttggttatgatccatctagtactagttttctatctagattcgtataatattaaaatgtgtcacatctactaaaattcattttattttggcttagagaaaatatcgtaaaatctatttggagaggcctctcgtttttgccttaaccagcgacgcctcaacgtgtggagaagtctactatagcgtactgcatgcatgcattttttttttttgagaagtctactacagcacatgtatgtccttttcctctccaaacaaagttttctcttaaattatttatccgatctacaatcagattacaccattgtgttcgttacaattaaatcttcacaacaagatttcacatgattatattacgatgaaaaaatatttatatttataaattacttttactatatatgtaagttacttttatcatatatataagttacttttatatttgactaaattacttcttagtcatataaaagtaaatttaatagagtctaaaagtaagttacatatattataaaagtaacttaaaacaaaacggaagtaactttgtcacgacattagaagtaaattcgttgtagggataaaaatatgactttatctagaaataaaatttaatcaacacagatcaacacacgtaagtttaacaatttttaaaagtaagaccatgtttagatggcactaaaacttttaaatccctatcacatcggatgtttggacactaattataaatattaaacgtagactattaataaaacccatccataatcttggactaattcgcaagacgaatctattgagcctaattaatctatgattagcctatgtgatgctacagtaaacatgcgctaattatggattaattaggcttaaaaattttgtcacacgatttaactctcatttatgtaattagttttataagtagtctatgtttaatactccaaattcatccgatatgttagggactaaagtttagtccctggatccaaacaccacctaacttcaatgttaattggaagtaacttttgcatggttcaaaagtaactctctataaatctgtttaatcatcgattgttttttttcctttcatttttagctgtgtagtcatgtccaatgagaaaaaaggcattcaataaagttactttctttttgttataagttatttctataatatactccctccggtttcattttaattgacgctttggacaatgacacgctctacaagatatatctttgaccttatttttctattataatatatacaataaataaatgcatgtttacttttattatagtgttttgaaagacaaatatatatatatgtttttctagtttctttaaactaaatatttttaaagttattgatggtcaaagttataaaagtttaacctcaatcttgtccaaaacatcaattaatatagaaccagagggagtatgtaaattacttttaggctttattgaatttactttcatatgtctaagaagtaatttagtgaaatctaaaagtaatttatatatattataaaattaatttataatttttcatcaaaatataatcatgtgggatcttgttataaagatttaattgttacgaacacaacggtataatcggatcgtagatcggatgagtagtttaagagaaaattgtattaaaattataggtggatagtgtctttcatatatagagtggtagttggtttagacaaaccagctaccactagctgtgtagtcacgtccagaaaatatatgataaaattgagtcggcggccggctactactttctgaataaggaccgtcggttaataggatggaacaaataagggtatgcatgatcttttggatttgtagagaaacaattctaaaattgtcaccttatagaactattgcaattcttagaggcttcaacagacatcttagttggtcgatctctttcttttttttttctaaaaaaattcccaggcccgtacgggattgtttttcttactgttataatttggacttcctttgtttcttggaatcatatcttcgtgaagtagctagtacatgattctatcaaaatttcgatgtctgcaaatattacacatatacggatatttattaatactcccttttagaagaaaggtaacaatatctacaatattaaaatagctttattaaatctacaattaactacattttgttagtatttatattttgggttgaagatgtttgtacaaacataaaaataagttgtgcttcaagaatcttaaatgataaatcaagctacaacaacataaatactccctccatcccaaaatatatgagattttggacagtctagattcgtagtactagtgtccatccgtccaaaatcctttatattttggaacggatggagtaataactacataattttttaaataaaataaatggttaaacgtatattaaaaagccaagggcgacatgtattaaaacggagtgagtattttttttaaataattttggtaaaatttgagttaataggaaaaagtaatatggaacgggtgagtaggattttattaagactggaattttccgctagtctttgcccctataacgtgcgcaagggacttatttgctgttgcatatgtgataagtttatgtgtatattggcgtgggcacgtatgcatcttctatatcggaaaaacacattgaggccatcaattgatcaactgccaatctcttccaaaagaaacagattaaacaaagaaaaaagagccccaactctaaacttaacatgaaactccgcacagcagacggatgtgtactgtagctactaccacaagccgagagcgacgttattcatacacgtgctaattggcaccgccagtcttctgcgtcctccccgtgttcggggatggcacggggatgtccatactggacacgtcgcacggcgtccccagcgcggcggcgtccccgacccgcctcgccttgcacgatatcagcgtcccgtcgaccgtcacgtgacccctgtgtttggacggcatcttcaccgcgacgtcgaacgcctccgccccgcgccgcgcgtccgccaccagcgcgtccagagcgaaccccggcaagcgcaccccggtgccccacgccacgacgtgctggtccttcgccttcttccctcccgagcagaacttctcgacgggcccgctggcgagcaggacgccgcggtaggtcacctccacggcagtgccaggctcgaggcactcgtccccgcgcaaccagctccgcgacctgatgcggacggtgaggtcgaaagtcgggtccagcgtgggatcccggccaagctccgaaacggggtcgaggccggagacggcgtcgacagcggcggagtacagcgcgtcattgtcgtcgattgcgaagaagatcaagccagcgaacagcacgacggcggggatgagtacgcacgcgcagacgcagcagccccagggaagttcttccggcgacgcttccatctgcatcgctcgctcccttggcatctcttccttctagagcggacttcgtcgataacttcaaatcgcgtcgctgcttttggcttgaagaccaggggcgatgtcgagggatttttgtgttcacgatcagcaaggcgggccagttttttttggagttccgtcgactcttgtttggaaacaactggagactccgaagctagctaggtctcccagtacaagtcggatccgaatatgtattcctccgttccctacttccctcctctttcttctcctctctttccttcttcccgctggagcaaattggtgcccggattcacaatcgatgaatttagtgaatttcgagcatatcgagccggctcaaaactcgttgaattttactagttagaaatttaccaaaagagatgaaactaacgaaaaatcgacatctcgccgcggcttgaaactcatcggccaattgacattaggaattctagagtttttgagaaagtatctatagtatcaaaattttacaataaaaactttatatctcaaagtacctattatctgaaagtattaagttttgaggaattttatagtatttgagaatgtaccttgaggtatctaaattttgcaataaaatttttgatatattgagatacttagtacctagaagtaccaagtttaacactagatagctttttaagtatggtaaaattgtccttattttttttacattacaaaatatggtacctcctgataccttctcatggatgataaaattatccatcaagattataactctgctagcatgaaccaccggtatgagacatagctacgagctgagccaggatcagctagcaaaattgattatcaagcaccgaaagatccacgccttaagggctcatttagtttaaagaattttcgtaagattattgtagtaattaaaatcttagttttttttttctatatgcatcatttgttttataggattggatcctatcaaatttctaagaattgtaatcttataaccctatttcatacgattcttatcatggggtgagaacttttgataaaaatcctaaggagtggagtacgtataacttgctaatcttttgcttttcgtattccttcgattttgaaaacctattaactgaataagcccttaaaagtttgccagttaaaattctaagaacattttaacatacaatatcaaaagaaaacacaaattagaaaaggagaaattttacggtaagtatcaaaggttttggtaactcgaggtacctaactacctggagtactttctctctgtgcagtagaatgttggataattgtgcatgcttcccgagcttctaaatgaagagattttggcaaaaaaaaattctacatatgaatatgttacaatgctgttttaaatcctttttaactttataatatttaattaaattcgtttatgccctcgaatgattattacaattcatattttactattcagcaacaaaagaagtgaacatgcccacatatagatgcatgttcccgtagaagaaggaatactttccggccttgttttagtaattctgtttaaaaaatttacaaatataatcctgcaatgaacactatgttcattgatcaatagcttcaacaaaagtgaagcaaaaaaaaacatataaatagtatacagtgaaagtctgtttagtcgcttttcttgaatcctctgcttcgttgccggacggtacggtacagactttccgtcgaattaactggtcgcgactcgcgacctgtgagttgtagacttgtagcgatggctgcgtgcaggctgcagcgtgctacgacgacgtcgccgttattcacacaatgttaactggcaccgcccgtctgcgtcctccccgtgttcggcaatggcacgacgatgttcgcgctcagcgcgtcgcacggagtcctcaacacagcggcggcgtcgtccccggcccgcctcgccctgcacgacacgagcatcccggccgggctggagcggtcgccaccgccggtggacgggatcttcaccgtgacgtcgaaccctgtggcctccaccccgccgcgccgcacgtcggacacgagcgcgtccaggacgaaccccggcaagcgcacgccggtgccccacgcgacggcgcgcccccgccccgtcttcgtcgcccgggcgcacagctgctcgacgggcccgctggcgaggaggacgccgtggtagttcacctccacggtggtgccgggctcgtagcagtccgtgcctcttacccggctccgcggcgagatgctgacggtgaggtcgaacaccgggtccagcgtgggaccccgcccgtcatcacccgtcgcggccgggtcgaggccggagacggcgtcgatcgcgacggagtaccgcggtctcgtgttggaatcgactacgaagaaaactaccccgccgacgatgagcaagaggagcactaccaacaaaaccgtcaggcagttatcgccatggttgcgacccgacaggcgacggcgaggagggctgtctgctgcgtgcgcttccacctccgtagccgctgccgctgacatgcctcgttcttccggcgagttcattgatgatcactacgcgtcgcaggtttggatggatcctaatctcggtaaccttgagttataagaaaaaaaacaaattcgtcaatcggacatcacaatattgtagtattaatttcgactaagcctgttaccttacccgagccagatttggttctagaattttagcccgaataccaatcagagtaataaaactatttttaattattaattacttttaatcacaaaaccgattgagaaagagaggagaagctagccttttccccatgtctcactcattatgtagaaggaagtaatatttaagtaaggagtaaggtaatatttacaaaaaaaaaagattggggaactatggcaacatctccgttaggtgtttggctcccgccaaagcccgagattttgactcttcctttatgttcacaatgagggccgccgtggataactccttatttcggaaaattcagtgattccgttcctttcatatttcccatgagactaggagaattatggatcaagtactacgcttgggtgcgctctgacgtgttgcaagtgactcccaccaatcatagactgggtcacatgcacccagtttgttggtttgatggggttataggctatctagttggcaatggtgtcttagcttttccttgtgtatctgcagtctatgaacaagcaacgagaggtttcatctgtgtgccgatatagtagacaaacgccgttgttttgctagacccggatcaccagcaagtccgaggtttagaccctattttaaattatggcacatgtatctataaatagttataccctgtagtaacgttacagtatttcaccatccaagataatcaagtctatatcacgggagaaaaacacaaagacacatagtattatgttcgcacagacacacgcgtgcatgcacgcacatcactgttgacacaagttaattcgcaccgctaatacctttagtactccgaatttgcattgcacgggatccccaagccgccgtcatcgccgaccggcacagctctgcaccacagctgatgccggttgtctctgcccttcggcggcatagtcagcgcgacgtcgaacgccacagccccgccccacgcgtccgcctcgaggccgtgcagcgcgaaaccgggcaggcgcactccgttccccgacgaggcgacgaccggcacctgctccgtccggccccacccccgcgcgcagacacgcggcggcggcgacgcgcgcgcgagggcgaggccccggtaggccaccgccacgtccatggcgggatccaggcacgcggctccaacgacgctccacgacgtgacgcggagggtgaggttgaactcaggggtcagcactggccagggaagatccgtcgccgggtcgaggccggaggcggtgtctatggcgacgtagtacttctgctcaccaaatagagcggctgagagcactaacacgaacaacaacccggacaatatgacgaatgtgataaagacagccacgcaggcgctgcagcgacgaggaggtggccctggctctgccggctgcacttggatcggcgccgcgcgcagcattgttgtacgttgatttttagcctctgtttgtattcgattcgcttcgtcctcgcgtttttgatggataaagcaggggtacggcggcctgggtttttatacacgttgatctgacatattggtagcttctgaagccttaaaaatggtatatgttgcagtctgaaatcgaatacacacggatagttcccgtagtttgagccttccatatcccggaaattatatatgttaatgtattcttttttacctaatatagcgtttggtttcaacgaaggtatagtaactggtgtcgcaccgacgttacgtttcctaagaccggatggagggagtggttaagaaactgttgtttatataatgagcaattttactgttattattgaggtataatgaggtattaaatttaatttaatgtaaaatttaatactatataatatctaagtattaagaggtatcaaatttacaatagaaaatgtactaggttattttttttgacaggaggagtaagtatcaggctgagtttagttcccaactttttcttcaaacttccaattttttcatcacatcaaaattttcctacacacataaacttctaacttttttcttcaaacttccaattttaattaaacttccaatttaggcgtggaactaaagacaacctcactaatataaaatataagtccagatttactagctaggatgtgtcccatcctaatactaggctagttttgttagatggagagagtatgttgcacacatacgtacgtgctcgtgttatagataaatttaatagaaatatttttgaggggaacatttaatagaagttgctacggtagattatgataatataaggattctttcataagcatgtacgtcaaaatttaaatttaacggtatatatagatgaagaaaccacacatttatatattgacttaaatcatcataggctaggttagtcaaaatgtataatttgttcataaccatttgagtttcttacaagtaaaggatgtgtgtatagaaattttggtttaggattttacattattaaagaataagaaaataacctgaatttggactaataatcttgcaggaaatacaaaagtaacccaaaaatcgcatcagttcgaaatactaagacaattgcgctaagatctgggctaagaaaaaactgtgccaagatgatcacggccggccgagcaaagatatactcttacggcgagcctctttacgttcccgtgtgcggcaccgccgcacccgtttccacgtgggtcaagacgcacggagcctgcaaggcgtccgcgtccccgacccgcctgcccctgcacaccaccaggtgcccgtccatgagcgcgacgtcgaacgccgccgcgccgttcctcatgtccgcggcgaggctgtcccgcgcgaaccccggcaggcgcaccgaggagccccacgccacgaacggccccgcgtccgccgacttcctccgcgccgcgcagacgcgcggcgcaacgggcgcgctggcgagccggacgccgtggtacgacacggccacggccgtgctgctcaccccgacgcacgcgcggctcaggaggctccgcgaggcgacgcggagggtgaggttgaactgcgggtccaccgctggccgggcgaggtccgtcgccgggtcgaggcccgagacgatggcgaccgcgacggacagccgcggggccttggaggcctccaatgcgcacaagacgagcacggccactacgaccaacaccgctattgcgatgccactgaaacagcggaggagacgtcgaatccgatcttggtctgccccgaagtccgcgggcatcgtcgtcgtcgacgacgcggcgctacctgtttcgtatgtatgaactggcttagtggcttggacggtggcgtggcgtggccgggagggggatgccggcctcacggacgatggggtgtggagttgggattgggagtgcacgactccgattaatatagtttgatcggccatgtcgacgtgcgtgcttggggcacttttttcgaaaccggttcttgttaggagttgacgactaaacgtccgcatccgactgcttctttttggatagacctatgcatcagacgtctccggacaatgttgcgcgtaatgttccattgctcgaaaaaaatatttcaacataaattgtttcttgatgtttcatctttcactaaagaacatttagccgctttatcaaagatgtttcaattgaatgcaacacaccgattgcaacaacaaaaacccaatatttgcaacatctgaaaattcagatggctcacagatcacaaagcaaaaccttcaccttaaccgtcatcgccggtctctggtggtgactccggctgcgaagaatacccgccgtaacccggttccagcgacggctcctgcacattttcgtcgtacaggctgcacggagttatcaacgcggcggcatcccctaccttaccgctgcacaacacgacatcccacgactcggcgtaggtgtacctttggaccgtgagcgtgacgtcgaactccgccgcgccgccgccccgcaggtccccggcgaggcggtcccgagccaggcgtggcacgggcacccctctcccccacgcgacgacgctctcctcctcggccgacggccgcggccccgcgcagagcgccggcacggcggcgccggcgagcaggactcctccgtagtacaccgccacggtggtgccggcctcgaagcagacccccatgtcggcacgttgcgacgcgaggcggagcgtgaggttgaactccgggttgagcgtgtcgcggggcaggtccgtctccgggtcgaggccggcgacggaatcgatcgcgacggagtaggaggccggttgcgtccagtctttgacgatggcaacaatcatcatagccaagaaggctactgctatgaggatcatgcaaaccatgacgaggcatacggtgtctatacgcaatcttacacctcctagtacacctcggcgttgagtgttgtccggctcagcgacggcccaatggacaggcagctcatgctctgccggcggcgcgatcacggcggacatcgctttctcagcacacgttgtgctttggaatctactttagagttttaatcttatcttgccaaacagagcgggtgtctggtatgtatttatgcgcctgaatcgattgatttgttctatccaccgtggatatacgggagagtttaaacttcgatatccgaaaatttgattgtcttttagtgcaaaatataacatcataaatatagccactcttaaaaatattaacatgatatgcatcatataggtgaatcatccaaatgttagaaataactagaatgttgtgatttaatgagagaaaataccattagtgttacctaggtattttaatagatgacatttttgaattttagatacacgtttgaccatttatcttatttaaaaaatttacgaaactatcatttattttgttatgagttgttttatcataaaaatattttatgtataatttatatcttatgcatttgtacataatctttgaacaaaataaatgtgtcaaacatcacttaaaaaacgaaacgaaaacataatattttcttataataaatgtatcacatattaacagaaggaattataatgtctcctaataactattcggcaaaatctaaatggcatgaagccttctcgccgactctcgtcctgcactcatcccacctgttccgcttctgcagattgacgtcaaacatcacttgagcgctcctaagggctttcacagtgtagtgatgtggcattcagcctcaagcttacacataggagattctcagccacgtgtgcatttcacgtgactaaaccaagaacgtgtgaccaaactgagacacgtgttcttcatccgctttgtgtcagcgtcgtcagctttaggaagagagagagggggaaggagaagaaaaggtggtggggccggcctgaaaagaaaaggtggtggacctacctaaagctcaagtgcaatgtggagaggggagctgaggtgagcttcgactgctttttttccaacatggacattttggttcctcaatgaggcgtgacgcattgctactgccctcatgctatcggcgaggcttggcagccagtaccctagcgcgctcacattggcacccgtgcgacggcaagctcgccccgcgattcccgcggcccgatgcagaagtccggcaccagcccggtgaccagcggggggtcttggtaggcataggacacgctgacgtacagtctcatcttttcgcttatgcttatcagccaaaatttgaattttcaaccttaaatttggagttgattttgaggtttttttcatccaagtttatttttcaacctttgcttttagatcgctaaaaacacgtatataaaagttttattcacaaattacttttcgtttgcaaatatgttgtttcgcttattccacgaataagcgaaacgatggctcccttaggcagcgggcttgatgaacaccagattgggggttgagggggggtagcacagtatagtcagtgcatgatttttttttcttttctgaaatcaccatgagtgcatgattttaggagagatcggcggtatgcgcacaggtgggaggggcatgcacgcgcaagatgagaggaatcagttgaaccgttccatgaggaatgaaagaatgggtgataagcgaaaccattgttgaactatagggacgttggatcttagagagatgatctagatcgttccatgaggaatgaaagaatgagtgataagtgaaaccatttgttcaatgaggaatgaaagaatgggtgaagagtgaaaccatttgttgaactatagggtagatgaaagaatgagtgatagtgaaaccatttgttgaacgtactatagtggagatgaaagaatgagtgatgagtgaaactatttgttgaactatatggtagagatatgatcatctctcttccttttggattttaaaattttccttaaaacaagaaaagaattgaaaaggctaccctaaatgcctacctgagtttaaaactcctcctataaacataagaagatttgttgcaaatatcccctctattcagtttgttttgagatttctccgattatcgttgctcactaattcttgtggccacaaaccccacaggcgattatatgaatattgacatgaccgtggcaaccttcctcatggagcttagcacgtcgttgggcaatgttggtcatgagtctttgctcctgaacatcgagatcgataaaagatgagctattgtgcttgcctcatgaggtctgaaagtacacggttcttcggtacatacaggacgataaagatgagcatatgatacgatattgtgtcgctgagaaagaatatgtgtctagggccatgttttaaattatataacacattcagaaagatgaaaaaataaaagcatgaacaacaattggggagaaatatcaaactggtaaataagaaagtatttgaaatcatcttataggggggcggtatttgaaatcatcctatagggaggaatctcaaactcaatgtgatatttggggtggttttcataatccctaaataataatattccgtataattttacgtggagttaaattttaaaatagaaatagatttaatataccacaactcttagtttttgtttacatacatgcaatttgcaatttgtatgcaattgatattagaaatagacttgggtttcgataagctattcaccctttttgcttccatagatccgattgtatttggtatatatctcgatcgatcaacaatgttttagaccgatcataccatgcaaatattttcctttctttggttaagtcataaatatttgacacttaggataatatttagtcaacatttgaaaattccaacatatgcatattttgtaaacaatattatgtacgtataaaccaattggtagaatccatcaaagaaaagaaatgcatatatgctgaccgacaaaattccatgaatttccatccaaggaagaaaaaaaacctcagataaactgacactacgaagccgtgatgatttttcgcgattggaagtttgtattcagatgcacctatcgtccaagccgccgccgaccctggcccagcacgtcgccaccgtcctgctgtacctgtcgccgtctcccttgatcagcttgacctcgaacaccgcctccccgctcctcatgtcctcggcgaggctgtccagcatgtaccccggcacgctcaccccgacgccccgcgcgacgacggtccgcttctcggccggctccttcggccccgcgcacacctccggcacgcggcccccggccagcgggaggccgaggtacgagtaggacaccttgacggcggtgcgcggctcgatgcacaccccgcgatactcgcccttcgaggcgatgccgacggtcaggttgaacaccgggtcgagcgccgccccggcgtggaggtccgtcgccgggtcgaggccggagacggaggcgatctcgacggagtactgcggcatcgctgggacgtagtactcccccatgatgattgatggccaaccagcccaaggcaccgaagaggaccccaaataaggcaatcccgacgatcatgccgcagcattccaggcacgggtcgctcgtctgtgagcgtccgcgctcccttgctgctctcggaccagaggcgccgccgccgccgcggctgaggggcaaaaagggctgttcttcctcgacgagcgcgcccatggttggtgatcgagattgagagactagatggatttttttttttttgggggtgggggcggagagagaggagggggaacggacggagcggccggaaggctggtctatatgtccgtggatcgaaacacgtcgtaagttgatcggacgtggagttcttcgggtgcccggaaagagatccgagtcctggtttacgggccaactatgctacattacgtatcaaacaaatactaatctgttatagtaccgtatatcgttattctatattcgaaataaaaaatactcctagatatatcttacgctaactcctactctctctccgtcgtactcctagatgaattctttgttaggatggatgacggatgaaactgaaactgattattattctagaacacaaattgattatgacaaaagttggtaagttgattttgaaaactttatatagattactaatgaagaaaagattttcaaaaaaaaaaatcgcactccctccgtcccataatataagggattttagagggatgtgacacaatctagtacgacgatgttatcgcggaggcagagtaagaatcggctggagtccggatcggctacggctaagtctgagtcagactgggttaagtgatacagccaattctgacaatatggctcgtatccgacaatcgggattgagttgatgtgcttcaagatgattgccgtacatggatagagtcctgagaaaggcaattgtatctattaattaggatattttatgtaaattccttagagataaatgtggacaaaagtctgctgcaaagacttacggtatcttagagtttgttagagataatagtcgtgtccggtatggacatatcttgtaattctcgggtataaatagaccccgaaccctatgtaattattaacacacgttcaatacaatctcggcgcatcgccacccttttgatttagttttatttcgacgagttcttgctttcgggttgagctgcatcggtttcgatcttcaataagaggtaaaacttgttatgacgacttgtgttctcgagattagtgcttccatctttatgatactctaatcttgtttatataattcgtcgagttatcatatatctcacataatctttgataatatcgtcatctaacctataaccgactagcacctgtcaatagaaggcagccgattaggttagataacaatgttaacttggattatgtgatatatctaccactctatgaaacatccagcggcttgattgtctagatattattcttctcttcatacttaatgctgcatcagttcagtttgatctattaagtcgtgcttagaacttcaatctctagcctgctttctggttgccgattagggtagtatcggagtttcaaccgatcttacctgatttaactacttttatcctatatgcttgattgatatgttaaatctgccctttatgttaagatcttgttgcatttaagtatattaggcttttgtttggtatattttacttgctttaatattttaatatagagtggtatcggaatattagccgatacatgctagatctatctgatcggctatgctatgaatatatataatcccactattaatatatgtttcgatctaagtgatttatactgtcttggcaaggtgaccgatctattccaatcacttgatttaagtatatatcgatatgaggattatatatcattaatatctacagccgatcgagtagatttagttctgatttgcttactaatacttaccgatcgatgtacatatgacatcggcctaaaataaatgatatgtcatcggcacttagccgatcggctatcatttatggatttaaccacggtttctttgtctttgtttcttgttgattacatgatcaaatcaactggcacgctcacacatccgaatgcgagttttggacctgcactggagttaaacagatctcccaggcctcgtgttttctgtcaacagacgaatctgtccaaactcgtcgtactatattttgtcacatccctccaaattatattatgggacgtggacggagagagtactttgtacgtcccaaaataatcacttcataaatacttttagaaaaatgaggtgtgaaattgaatgagtataggttgtgactagattaagataaagaaatacgcaaaaaaattaaacaaaaaatagtttagatgaaatagaaggggaaataaaatgcgagatgttgtgattagtttagatgaggagggaatgtctaattagcgcaggtgcgctaggagaataaaatggcgcataattccaggcccacatggatttttctcattcacgcatcttcaattttctcccatgtggcatgcgctcacttctctcgtcctctgatctactgggcctctaggaccacaagctcaaattgtaggccaacttcatcaacaaaattaattttaaaatattcatcaacaaattcaaattcaaaaaatctagtaaactttttactagaatttgaaaattttaacatggattttaaaacttttcaacttaacttttgaaaaaaaatcaacccactttttgaaactttaattaaaaatttagaagtttcaaatcaaatttgaaaactttcaacttgacatttaaagctttcatattttaactttaggtcgaaagttttaaaaaatgagttgaaatattttattttgactttaaagttttcaaactttgagtcgaaagttttcaaattttgagttggaagttttaaatttgagttgaaagtttcaggttttgaattgaaaatttcaaatttagtgtcaaactttacttgaatttgttaagttttaataatttgaaatatggtataaaaataaaagagtaaattttaaaaaactacagaattttaatcaaactatcaaaaagctacagattcaaggcgttatatcacaaaactacagatttgaaactaagtatcacaaaactgcaaattatcaagttttgtcagggttatggataacacatatccaatagtaatcgattaagttcggcggggcccaccatattccaaatcttatacggaatcataccttgtatacagaaggagtttcggataaagaagaacaagtagagttctacatggaaactataatgactactctaattgtatccatacgtgtctccctagttttacttagacaaaaggggacatctatgggtataaatacaagaccccataggaggagaggggccacggaacagtcagaatagacactaatacacgccgccaaacatcgacatcagatatcagcttagacatacccaatctagtgcatgtagaggccgacaagagggatctagcgctatctctgatctcgctgagttcatatttgaggaggaagactaccctatcatcgactatgtgttggtgttcatgccgccatatcgacgatagctagatagattatctcaaatattgtacttttgtgattctgatgaataagagcaacaccggcttcggccaacatgagtagagctataacctgattctgatgaataagaggcctgaacctgtataaaaatctttgtcactgtttcttttacctcaatctggcatatgcctttgtaccaacgatcttcataccatgcaaatatcgtagtcgtgctaaaacgtcgacaagtttagatctctagcactactattacgttggaggtataagcattacaattttgcgattgaattggtactaaacttttagttttgggataattttgttactaaatctgtagttttgtgatacttggccttaaatttatagttttgtggtaattttagtgttaatttatagttttgagatatattgccttaaacctgtagtattgtgatagtttgatgaaagtatatctaattttgtgaaatttactcaaaataaaatgaaaaggtatgaaagaaaatgccttttcatggtgactgcctgagtcaaccggaggaaaatgaaaacctttcatgtagaaagaaggcgagcaacggagagaaagaaagaagtgcgaccattaattttgacaatgtgaacctttgcaaaaactaattttacaaatgaaccgtccgccaaaacttatttcaaaagtgacccttttttcagcgccaaatcgtgtggcgctgaacttagacacctcagcgccacatcacctggcgctgaatgccgtgccaccgtagatggaaggctgagtcaacgtgccaacgtacattcagcgccacgctatttggcgctgaagtgtctaatttcagcgccacacgatttggcgctgaacaaaaggttattttttaaattagttttggcgacggttcatttgtaaaattagtttttttgcaaagggtcaaattgtcaaaattaatggaagtgcgaccgtgtatggagaaaagagaagcatgtgggccggcttgggctgagcgtacgccagcaacttataacttatcaagcgcatatgtgccgattagttttttcaagatgagaataggtgtaaaggttattatattttagtacaaatgttgaaccctattaggtgatgagtatattttagaacagatatatccttgggagcttgacaaatatgcacaacataattcaaatacaatctacggagaatgcgtccataaaaccaaatctctatacgaacgttagataaagtgtgaaaaaataattgggggaaaatcagtcccccaaagtccttacacatagagattttaaagaaaaccaagaaagtaccaaatcagatacatcctgaggacacgagtgatcactactctagaaactacggaaagttacaactcaacacatgtgggagtggttgctgttgtgttgatctcgtgattggattataaactctgaaggaaccatcttctcattgtttgtattttttgcttataattaaaatggttgaaaaaaagttttaaaaaataaaaagacagactaaaatggagtgatttatcatatatattattgatattttaataatttttaaaaattatttaaattacatgtaaaccacgagagactcaaaagtggttagagttcccagcgaatatgtcgttttacacggcactaggtagatcgctgaagccagtgattccggcaaggcggcgcgggtccaccagggacacgtcgcacggcacccggagcgccgcggcgtcgccgaccctgtcccagcacgacgccaccttccgctgcccgtagtacggcatcgcgagcgtcacctcgaacagcgcctcgccgcgccgcatgtcctccgcgagggcgtccagctgtgtccccggcacgcgcgccccgctcccccgcgcgacgacggagccgtcctccgccgcgcccatcggccccgcgcagagctccgggtccgccggcgcgcgcccgccggccagcgggacgccgcggtaggacaccagcaccgacgtgccggccctgacgcacgccccgcgggtggagctccgcgaggcgacgcggacggtcaggctgaacaccgggtcgagcgccggccggccgaggtccgtggacgggtcgacgcccgagacggcgttgatcgcgacgaagtagtcgggcgggctcgccgccatcccgtccgtgtcgggccggcggatgcagaggacgaccagcatgatcgcgaagatggccagaaacaggccgaagcatacaccgaaggcatccgtgtactcatcgtcttcttcttcttcctccggtcgaaaggagctgcgtcgaccaaggagaggtggctgttcttgctccgggaacgcacccatggcctcctctccagatttgggcttctacgcttgacgtgacgtcgtgtcaattgttaccagcacgtactcgtggacatccatggagtttgcaattgtaatcggccgcggcaaacgcagaattctacaacgcatcaacgcgaaacattcgaatagaaatcaaattatctcccgtatcattgccgaactcatctgtaaatcaaactcccaatctgattactccttggattaatcttccaactgcgacctgtatataactgacgccttgatacggcggacgctaagtcataacgcctttcttcgggactgtctaggcatctgtcgtgtgatttttgagaaaaaatcactcaaatttttcctcccctcaaatctgcatctaacggtaaaaaaaaattaacagtacagagaaaccgtccatgtagcctgtgattgtgctcgttagtagagtagttgcatttataactaaaattacggtgttttataactaaaattacatttgtaaaaacagtagatatggcatgtaagtgcactataattttagtacaagtgcactgtaaattttggtaactagaatatttgtcgttttagtataaatacattgcttgagaaaccatgcagatatctgaagtgttaaatgttgcatttataactaaaattacatttgtaaaaacaatagatatggcatgtaagtgcattgttttagtacaagtgcactgtaaattttggtaactagaatatttgtcgttttagtataaatacattgcttgagaaaccgtgcagatatctgaagtgttaaatgttgcatttataactaaaattacagtgctttataactaaaattacatttgtaaaaatagtagatatggcatgtaagtgcattgttttagtacaagtgcgctataaattttggtaactggaatatttgtcgttttagtacaaatacattgtttgagaaaccatgcagatatctgaagtgttaaatgttacatttataactaaaattacagtgctttataattaaaattatatttggaaaaatagtagatatggcatgtaagtagactgtaattttagtataagtgcactgtaaacttttttgtaactagaaaaagaaagaaagaaatagagagaagaaataaatggctactaacatgcgtgatgtataggaatccatcgatacaaagtcaggttgactcggtcatggaatcaactgaccgtggttttgcacaaatcttggaaaacatcgtgcggcgagaaaaacgtcaaatactatgaaaaaaatcacccgataaatatttagcaaaaccgcctttcttctactgttgcttagatcgcgtacggagagaaacctacgaaatcgtcgacatggggcgctcgcgggagtacttatgcgagcggctcgttgattcttacgatggaagactgcggcgtgatgatgaaggggttctgctggaatatccttcaggggatcctcggcgccctcacggcgctggtgctcatgtcagcgttgctctactatccctacaagtggtccttcgacgacggcaagtccgcggagttcagcgtcgccgtcgccggcgtcagcgggctcgacccggaccgcgacctcgggcggcccacgctggaccccacgttcgacctcaccgtccgcatcaaggagccgcgcaggtacagcgtggcgtgcgtcgagcgcggcacgacggcggccgtgtcctaccgcggcgtccagctggcgagcgggcccgcgccggagctctgcgggaggaacgagaacaccacggaggcgaggtccgtgatggcgtggggccacgcgaacgccgtcccagagttcgcgcgggagcgcctcgccgaggagctccgccgcggggacgcggcggtggacgtgaccctgacgacgccggcgaggtactgcaggtcgtgcatgcagacggtgatcgagtgcaagcatcgcgtgggcagcggggagttctcgccgcggtgcggcgtgacgacggatttcccgacctttcccgacagcccagacgtgccgtatccgctgtatcaggtattgcagccagggaggaggctcctcaggtggtagtcaggttgctaatctaggttgtttttttttttttgggaggaaatcaattgtaacagcatcataaggatttcgttttttaatgaatttcatctgtttttatttgacaatgacaatgagtcagtgatccatatgcattcagtttttattgatgttgacgattgaaagtgtttttttttcttgacgcatctggcatcctggtgttaatgatcaagtgatctctcaaaattcaagtaatcattcgtaatagtggattcatgagagagattttataaaggaactacccatgtaactttccattgagaagttcctaaaaactttattaagatataattacaatataaaactaatataggtacattgtaacaaatgtgtaactaaagtataagtactatgtaattgcattataactaaaaccacgtagcttggtggtggatagcgcgagcatgtcgttggcatgttgtgggtttgactctagcaccttgcatggagtgtttaatttttgctctctatcctgtgcatgaatcttaaaagtaaaaaagactcccctaactttatgtagtgtgcaattgtatcactgacatgtgggccataacaaagtagggcccatataatcagtgttacaactacagactgcacaaagttagaggatatgtttcccttaaagtgtatcccatggtcgaaaaagcgaatatgtttcccttaaaagtgtatcccacggttccccgaaatatctatatcgagtttcttccctaaattactatagtagtatagcaaattcgtttggaagtacaactttcgacataaaaaatctctaaaaactttcacatgtaattacactggcggtaaaatcataaaagtataacttcacacaacctatcaatatcgcttatacattttcaatataaggccctatttatatcacaccctaaaatttttcatcctatcacatcgaacgtttgaatactggcatgaagtattaaatataggccaaaaaaataactaattttacatattgagactaatttatgagacgaatcttttaagcctaattactccatgatttaacaatatggtgatgcagtaaagatttgctaatgacatattaattaggcttaataaattcgtctcgtgatttactgacggattctgtatttatttttttattagtgcccaaataccctatgcgataccctatataatatttgatgtaacacgccaaaactttacacccatagttctaaacaccccctaaatttagtctattcactttcaatatgaatttagtcaatattgattttgtgaggttagggggtttgcttcttatgagcatatcttaaaggtgtgtgtactcatgtgcggtttgtgtaataaggcacaagaaagattatatcagcatatatgaccctgaaagacaagggcatgaatgaactggataatacttacaattcggaaaagtaaggacgtgcatgtagtggataatacttgcaattcacggcaaggcgacagcagaacaccagcaattaataactggtgaataaaaacaagaaatccatggaattacattgccaccccaaatcaaaattccccaagattctatggtatacctcccccataccagaccctttacatcaccaaaaggcaaaatgaaaagaggttcatcaattagaaacatcctgacaatctaaattaccaacctacacaatcttactccttgtagcaattacaccactgctccagttctctactatttcttcccaggcccccttcacaatgtatttaccaccaagcccccattcactttctccagtatacccccaaaaacatatttacctccaagctcacctccccatttccggtataccgccatccttgacttgaacagaagaacaaaggatgaatgctaagctactgcactactgacctactaagcaatgacaccaatgaaatttctacaccatcatctttgcacttgcttcgcaagagacaatggcaaactgccttctaccttggatggggtttctccaagagtgacctagtttgtcggagctgcggcctcaggcccggaggtgaagggcattggttctgtgagcgctgcagcatctgaaccatggatggtgtttgataggagtaaacaagtgtggtactgtctgtagagtcaccacgcgttgtagctctctgccaagaatgtgagctcaatccagatagcagatatgccctccccgaagcttcatatcgttgccggctagccatcctatcctgcatctcctttagctctgcatcaagggaaatgcacaggcgatccccactctttcttgaaaaagattccgagagtatcctccgacaatgctcaagaatagccactgcatcagaaagagcacccctctcagctgctgcccttgcagcctcaatagcatcagcagcacggacacggttcctctcacgatcaacctccatgcaaactggctcagacgtaggtgactttggccttaggatttttacctcatctgcatgaatcttgatggcttcattcgttactgaatctctataggcacatgcaaccttcaaaagcatggtctgatcacgagattgtgggaagctcaaagatagtaagaagtccctctcctcatcagcataaagatgaccaacttcaattgatccatttcgtccatctccagccaccttactcaagtaactaccagatttgatagtatgaagctgaacactaggatgcacgcattccacagttagtcgcatatcctgaacaacaacactaagaagcccaccaatgcactgagcaaatgcatcctgaatcacactttcatcctcgataaaggaaaatgtaccaccagaggactcagcaattgagtgcagagcatctgaatcatgatctgcaccaaaaccaaagccatggacaggcactgtgcagatagtatgattcagaatggaagatggaacaagtgacctataatctggacgggttcccctaacatttgaggaaatattgtatgtgtcttgaccatctgataacagaataatgctgcagactggattcttataattgcgatcctcaataaccttggcagctttcttcaatgcatcagcaatgttcgtaccaccaccagcaccaagcaagttgacagcctgcaaggcttgctgcctgccagagtgagacatccgtcggagatgaaacaaccttctggcagtagatgagaaagcaataactgaaaggcgatccgaaggcccaaggtgttgaataacaaaacccatggctcgttttaggagtgctagtttggtgcctgccatactgccactaacatcaagcacagtaaccagatcaacaggagcgcgagatgtagggtatccaattgaggtggcattgaatggtctgcctgtgacttgttctgggttagcacaaggggcttttagatggatcaaaacagcaaaatcatcttcagatgacgactgtggaatggctgagaattcaggatatgtcttgatctccacagctctactgcatctagcatcacgactgtcaccagactctatcagctgcaaaggttcatcgtcattgaaatcaactggctcagaagtatgggaaccagaagcttctcgatggtgacttggaacctggcgtagaagagccatgtaggtgccttgttggggtaatcgagcttgattcacattcaacccacttctaccacgaggtacaatagaagataacgagcggttaaagggtatctctttccacttcgctcgacaaactgggcatacataatttccatgtttcacactggaggagatgcagtggaagtgaaacatgtgagaacattcagcagtgaaaagtgcttgtccatggcctgacttcatgggatcgaaacatattgcgcacattccctgttgagagaaaaaaagaaagatgtatcaatttaattgtgcaacatcagaactcaccccttcacatttgaaatgtgcaatcaacatggagacatgtgttttaaaacatgaaacataagggcttaaagatgagccttgctgcgaaaagacggttcaactgatattaatgatactttattgagaacaaaactttttgtatgttacatccaacatagtgaacagactggcatataacaacaaccctttgtcctgatatccacaccccgtacacccctatttaagtccttatcttcacagatcaattccactgtacagaattaagccctgcctagagtttgccatactatgacagaagccgatctcaaattctgaatcaactccaagatctgcatagatatctccactaatctgcatgttcaacaaatttacttaggcccaccttaaattaccattatccagacttatttttcatcccaattcttcatcaaagtgtatccacgtcgaacaatatatttgtttgttatttctgaaacatagtcggatagacacaaactgcaattcatggactaaagttactactttcttgatttattttcattggatcaatatggcaactcgaatagggcctcacatgaaagctaaacaaaaatatatcacaaacacataccagaactaaatgaattgatgtcatatcacatccattccatctttttttgtgacatacaaggtgttggatctattagttcattggtgccatcataagctaaggctgtgtttagttccacgccaaaattggaagtttggagaaattgaaacgatgtgacagaaaagttggaagtttgtgtgtgtagaaaagttcaatgtgacggagaagttggaagtttgaagaaaaaagttggaatctaaacaggacctaagataggtactgttattgattttgactaaaacataaaaaccaaagcatgttcaaacaaatacatcttttgactaacaccaagtcagcaaccacaactgtattttatattttatgataacgtatgcacgtcataaataccaatggaaacagcacacctgattttacggtttccttactgataacttaaaagaaatacatattttgcatttgggcacccaatatatgttgcatttcgcggcattaccttgacaaataaaatcattttaaaccagagaaaccacaaagaattgtcagacttgcatgcgtgtcaatatattcaactaaacacagtaagcgttcatgccagtttaccaaattgtcaaatttgataatatagacaaatcaagcttagcaaaggcagtaatgcggaaatcacaataaataactgtgcgatgcttattatcagaacttttcaagtcttcacttctgaccaaggcagataaatgtcaaccaattgagtaatgagtaatgaggaaatcctcgtgaagtagttggtcaaacagggcactaccatacacaatatctcgctaaatcagaactgctactaaacaaaaggtgtgaacacagcaataaaaggcatcaatgaacaccacacgaaaaaatagtattgtatcagaaaacatcacaaattgacattgaccattcaaagagatcacgcacatgccatgacaactaaataaagataaatataaaaagaacagtataaggtaattctaataagaggctggtgatacaaattttcagtgatggatgacagctacagttggaaaacacgcctttacaaaattaattggagttggagtacgtagtagtagtactaacggagtaagagagagacggcaggatgatactacacgtgaacacatggggagttgctgaggaaagaagcgaactttcccattccggaacgagcaagtggaacagtagaaaagaagcttacgttaagatatgaatgtatcttagacagaaaaaaaaaacaactgggtttttttatttgaattaacccataacgaagcgcgataccgaggggaaaaataccagcagactgatagctgatagaaattcgtaagaatctctgttggcgtataaatttgagaaaaagaaacaagcagcaaatttttgtactatggaagatatgaaataaatacaacagagcccaaaaagaagctataaaacacaaattgattcctttctgaatggtgaagaacaaaatggtatgatagtttgctggaacatgacacgaagaatggagcaacaagatgaagccaatgacggatgcatctcttttcttttttggatattcctttgaataatttagagaataaatagtttgcagaatcatcaaaatctgcacacaaaatggtttttttattataaaatgggcaagacccatgtttcctcagaaacaacataggatgatttcaattgcagacaaagtaacaaaggtaatgacaaatccaaactagcagaggcgaggctcaagacaaaactcagtattaaaaaaacagatgcatacaaaaaaaaattgctagacagtagacacaaacaaaggaaacgcccattactgcaaccaaaaactgtcggccaggggaagcacatctgaatctaaatcgttcacgggtgaagccacattgctccaaatccgcgcctaaccccggaggaaaccccaatctgctccgcatttcacatccagccaccccgaaccaaggctaccacggatacaatccaaggcacaggttatataactcacaatgagaagaagagggagaaaaggagaagagcctaaccttggcggacttggtcccggacttggacctccggagcgggcctgctcccggcaacgccgcggccggcgtattcggcgccgacacatgcgccgccgccgccgaagacgcgtcgtgggagagcgcatccgacgcgcggcgctcgctgacgccgtcctcccagtcgccggcgacggcggggaggcgaacgcagaggccggcgcccagcgccttcttggccttcctccacatcccctccattgccccctagagcgcgcacacacctctcgcccctagcacagattcgtccctactcgcgacaagcaactacccgctacaaggagaggagaggggcggttttgacgaggaggagggggaggagccgccattggagagtctgagtggcggtggtgaatggtggtggcgatgctgcggctcttggtttgacccgtgcgccgctgctgatgagagggacagatgacaggcgaggaggcagacagccaagcagaggttgaggagggagagaggtgacggtgggtggatgagaggaggaggagggggttatgacccgtggtggtatggtggtgggagaagcgaaatggaagaagagatgaagaaaaaacggaggggttttcgctgccgatgtgcggtgctggtcaggtcgcacgcaccccggttggtgggcgccgactccggtcataaatcacagcggaacttgtggctgggaggattggcccatattttgcccaccaagctcaaaacgatggaagtgtctctgctgctcattgcgatgtgcagcatagatcaggtaaatatggttttaatgttcctggagtaccagttcaaggcatgtactagtagcatgtagaccgttgttttggcctactatcttcctttttccgtgagagagctaatgcattgatttacacgctctaaatattagtatatactatcaactttaggcccatagagaaagaatcaagaaagaatgcgattttgtcaagttctcgcatgcaataatcgcgccttttttttaagaaaatcccttaagtatccatgaaagttcatctaatctcttctatacccctgaattttgctcaatcacttacacacctctgaattttagtttggatcccttccatgccctttccgctagttgaccgttaaattcttttgaaaaagtccattttgcccctttgctatgaagaaacataataaattaatgaagtatattgttggaatgtaaaaatttattggatgagactattatatttatgagtatgtgatgcaccatattatttgtaacaaatttacttttacatacgacataaaaagttgatacttatttattagttattaaaagttcttttatgtagcatatgtgttttcatagtaatacaacagatttgtttattacttcagaatacatatgctaaaaaaaatcttttaataactaataaataagtattaatttttatgtcatatctaagtatatttatcacaaataatatggtgcataactatctcataaacataatagtctcatataacaaatttatatgctctaacaatatactctattaatttatatgcttctttataccaaagggcaaaatggactttttcataagaatttaacggtcaactaacggtcaactagcggaaagggcatgaaagggatccaaactaaaattcaggggtatgtaagggattgagcaaaattcaggggtacaaaaggggtacagaagggattaggtgaactttcgagagtacacaggggattttctcttttttttttcttgacatcgaactattacccttgcggtttgtagatgaggcgcatcgcataggcaggtgacatagaaatgtctagtactagtcaaggttgtcagtatcccgattcatatcctagtatcttacgatactacgatactacgatcttaccaagctgaaacgataccgatcccacctagtatcctaattttcatagtatctcgatcctactattcattactacacgatcctataaaatcttaggtggtatcccgattctacgatccctacgatactacaaaatattatttaaaatatcatggtttgaaaataatgtaaataaatatactcaaaattatataaaaatcagttaaatatatcaaaaccaacatggtttctcttgataaaggtctctatttgtatgacatatatcattactacatttttttatatagaatgtctatatataattaatataaatattaattaaacttaaaaaaagaaaatctcatagtatcccgatactacgatacgatcctacgatgcgatattactttgagcaaaacgatactgcctggtatcccgatcctaacaaccttggtactggtgaagcagcatttataggattggcatttgtctaagggggtgtttagatggggctaaaattttttcagtacatatcatatcggatgtttggacgctaatttggagtattaatagactaataaaaaaattaatttcataaatgagagctaatctgcgagatgaattttttaagcctaattaatctataattatgaaaagtttactgtagcatcacattgtcaaatcatggcgtaattagactcaaaagattcgtctcgcgaattagtccaaggttatggaatgggttttgtaattaatgtatgtttaatactccaaattagtgtccaaacattcgatgtgacagggacttggaacaagtccatgtttcccaaagaggcctaagaccctatttagatgggactaaaacttttaaatccctatcacatcggatgtttggacactaaatataaatattaaacgtagactattaataaagcacatccataatcttagatataatcttggactaattcgcgagacgaatctattgagtctaattaatccatgattagcctatgtgatgctacagtaaacattctctaattgtggattaattaggcttaaaaattcttaattagtatttaaatataaagactaaagttaagtgactttaagtgactgaattcaatcaccacctaaaggaggcagtccaacactccattcaatgatccatttgctcatcaccaggcaccagcagcgtactactcttgtccccgtgcttgcatatggagtagtagtagttgttgtgtttgtccaatgtctcgatgtggcgcggccggtgccgctccatccggatctggccatgggggggaggggggcgcagatccgcctatgacgacgcaggatctgtcgccttcggccaccgccagtgccggaaccacttcgactggaggccggtgacggcggcaagatggggttgcggatgaagaggagggagtcgacgacgattgctggagagggcgaggagggaggtggcggcgacgggaaccgccggtggcaccccttgcgctcgacgcgactgccgtcgccttcttcgcagaggagatgagacagagagaggagccagcggaggagacaaggcggagagaggagcaggcgaaatgagaaaaaagaggaggggtacggttggtatttttttcactagggtaccttgggctgggacacccattatgagctggcgtttctccatcaagtggcctcagattttgaagaacccatctagaggtattctccattgagagatgagtttcatagagagtaccctcagttagtgaggacactctaggggtggctttggttgtagatgcccttaggctgagttcattacttactgttcccaactcctgcccctctttttccgcgtgcacgcttttcaaactactaaatggtgtggtttaaaaaaatgtatatacgaatgctgttttaaaaaaatcatattaatccatttttcaagtttttctaactaatatttagttaatcacgtgctaatgaattgcttcgtaatttctgccaatgggagagttcccaaccataacaaacgaacgaagccttaaaactttgattttcggcctacatttaaaactttaattactgccagattacatatactaaactaggatagcaattttttcgttcagtgcggtttccacctacaagccaggtccgaggcgatttttcaacctacgggttgaccgaggtgaggccatgacttttggctctgtttagttccaaagttttttttttctaaacttccaactttccatcacatcaaacctttcatacacacataactttttagtcacatcatttcaatttcaaccaaatttccaaacttcagtgtgaactaaacacaaccaagtatagggtcggatccaaagtttcacttgtggaacccatagaagatgaagaagggctgacacacctgcggacgctagcttcccgagctagcttgcaggcttcggcaccatttaggatccaatatggttgtgacaattttaaaccgggatgacacactttgataagttctggatcttaaatttatatttgagaatatgttaacctaataacacatgcaaatttagagatcaggcgttcactttactccttaaaaaacttattgttcgtccatctctgtttgacagcaccatttaaacaccttttacgtttatactgtggttaaagcacacctcagagactgaaaatcaagctgatagaccagacaggccagtgcacgcacgcacgcgctacgaccggttatttgtatcgatttttcaatttgaccgtcttgcacatgctcctacttgtatagttttattactactagtaaattattttaggccgcgaccgcgagcacgtgcagcgcgatctcaactcaggcgagattctccttaacttcgagcccaaattgcccatttgcagtttaacttttcggccatcacctgacccttgttcgcgcactccagcaatcagcgccggcagattactttacggatttaggccatatcgagcacggatttgatgcgacgtgatcgcgtaaagtgatctgcatgtctactgcatatgcaagcggctagccgctgcagtgctgcactggagtctggagccgagctcctgctaggagatgcaaagcaaggctcctgctgggagatgcaaagcagagcaggtggtctcatgttggtgcaatctctgccatgataacgctgcgagagtagtggttagcttaccttagctaggtgtcctttttgatacccaggttttagtagtaggacagtatagtaggagtagtgctgctttctgcccataaagtagcatggactttatctactatgtcagggggtgattcatctttgttaagtttacaagactgtaaaaaggttgcatcatgcatggcacgggaagtttaacacccttttaaccaccccctggcccctggggaggttgtggtttgctaaagttgatttgacactaaaaaaagatgagtacccctttggcacgatcgtgtgagtttgactgaccaaagttttttttttaaggagtcgctctcaagtgaagcgtgaatatatttgacctgattattgcaacaacaaaaacgataaacatgcgaaaccgcatgtattgaccgccgtttggttcattttttatcgctggaattgaaggagctgtcgtttacgtttgctaaactacgatatgacagtctattcagagatgaaggaaggtcattgattagtacctaccacagctcaagaaagatgactctgtttaagcctgtcctcttggggggccatgtcaacggatccgactttgtgtactaaggattaatggaccactgcgatatgtttgcactttgaagccttttagcattgcacttgcaccagaaggaataaaccacgaaccatcgtcaatataacccatctactccggttaccgtatatcacatggtatctgcttacctgggcaatgagcatgtaccgagtggcagtagtgaatacggaatttcacaggaatatggtcaattccttgcatttcacagtaatttaattttaaatttgatatatatcatttcacagtaaatcatgggaaaaaattacacttttttattacaaaagaaaatttacatgttttgaaccatctggttgaataattcactttgcgaatatgcatggtcagttccttgcaagttcacttcacagtaactagcatagtggcccgcgtagattgcacggctagtattactatattttctctcttataatagcatatatattttctcaatgtattattcaaatatattaaaatgacaacataattttgcatgtcttagagcatctccaacaatctctccatcccattctccaagtcaaaatttagccattctagccaaaaatcgtgctccaacagcctctccaaccggctggccaaaaccctccctccactagccaaatttagccactccatttggctggccaatggtgggccccacacagcccatctcctccatccccacacgacaaccaggcacggaaggagcacgactgcacgaggaggaggcgctcgccgcgaccgccatcctccgctcggcgtagcccgccacctccgctcgccgcggctgcaggcctccgctcgccgccgtcgtcccccacgcggtgcggcccgccgcctccgctcgccgtggtcgccgtcccccgcgcggcgcggcccgccgttctccgctcgccgcaaccaccggcccccgcgcgccgcagccctggccgccgcttggcgtagcccgccgcctctgctcgccgccgccgccggcccccgctcggcgtagggcgcgccgcccccgctcgccgcggccgccgtcccacgcgcggcgtggcctgctgtctcggctcgccgcggccgccgtccccctgttaacgaccaaatttggtaaattctatcactattggcatcggagatgaagatcagatcgaagtggaatccaagatgaagatcgttgcggaaacaaagtaagaatcggctgcagtccaaatcggctaaggtcaggatcggcagagttcgagtcagacggggctagccgatacagccaatttcgataatatgacccggtgtacgtcatcgggtttaagttgatgtgcttcaagatgattgccacgcatggatagagtcctgggaaggcaattgtatttattaattagaatattctatgtaatttccttagagatatgtttgggcaaaagtctgctatagagacttatggtatcttagagtttgttagagataatagtcgtgtctgttatggacgtatcttgtaattctcgggtataaatagacccgagccctatgtaaaaaaaaaggacattcaatacaatctcggcgcatcgccaccctttttgctttacttttatttcgacgagtttgtgctttcgggttgagctgcatcggcttcgatcttcaacaagaggtaaaacttgtcgcgacgatttatgttcttaggattagtgcttccatctttatgatactctaatcttgtctatgtaattcgtcgagttatcatatatctcatataatcttcgataatatctttatctaacctataatcgactaacatctgttaatggaaggcagccgattaggttagacaacaatgttaacttagattatgtgatatatctaccactctataaaacttccagcggcttgattgtctagatattgttttttcttttcatacttaatgctacatcagttgagtttgatctattaagtcgtgtttagaactgcaatctctagcctgctttctggttgccgatcagggtagtatcggagtttcagccgatcttatctgatttaactacttttattccatatgcttaatctatatgttaaatctgccctttatgttaagattttgtcgcatctaaatatattaggcttctgtttgatatattctacttgctttaacatcttaatatagagtggtatcggagtattagccgatacatgctagatccatttgatcggctatgctataaatgtatataatcccactattaatatatatttcgatctaagtgatttatactgtctcggcaaggcaaccgatctatctcaatcacttgatttaagtatatatcgatataaggattatatatcattaatatttacagccgatcgagtagatttagttctgatttgcttattgatatttgccgatcgatgtacgcatgacatcggcttgaaataaatgatatgtcatcggcacctagctgatcggctatcatttataggattaattgcggtttttttgttttatttcttgttgattgcaggatcaaatcaactggcacgctcatacatccgaaggcgagttttggacatgcactggagttaagcagatctcctaggcctcgtgttttctgtcaacacccccacgcgccgaggcgccgcccccgctcaccgcgaccgccgtcccacgcgcggcgcggcccgccgtctcggctcgccggggccgctgtcccccgcgcgccgcggctgccgcctccgctcgctgcggccacccgtgcggcacaagctccccgccgcgcccaccaccggtccaccgccgtcccctcccagcttgtcggcgtcgtctgctcccagccaacgcgagaaaaaaagaggaagaggggaaggaaggggagaaagaagaaggcagaggctgacatatgggtcccggtgtcatagggttggtttggtttgaggcctatattggccttaccaatatttggcaatttcaatagtgtttattgtctatttggtttggagccaaattttggcatgcctaagaaataggccatttcaacagttaatttaggctattttggcttcaatccaaacacaattttttcttttgccaaaattagccatgccaaaagttgccaaaatttgacattgacaaaaattggtaaggccaatttaggctacaaaccaaactagcccatagagttaaagtagagagcgtagataaagaggctattggagtgaacaactagtttgactagccaaatcaaatggagagttggctatatgggtgtttggagagttagatttggagaggctgttggagatgctcttatgagagcaaacttccaatattcctttgaattttagttatttataaattgtatttctatttgtactctaaattctactttaattttattagttttattctaaattttaaaatcttatatgtattctgtactcttattccgatattccttattttaattcctaatttctattatttctaaattgtatttttatatatggattctaaacttatctttcaatatttttttaattccgaattttaattatttttaaattctatttctatatggactctatattcttcatccaatatatttttttaatttcgattttttttatttctaaattgtatttctagatggactctaacctttacatttaattttttttatttttttaattctgaatttccattagttctattgtataccgatttagactctaatcttagcttcctatattccttacttttaattccaaatttcagctattattaaattgtattcttatatagactctgttttttctttttctcctattaatgtggaaatttctagaccattaaagcaaacttgaaggcttttttttctattcctttaataatataatagatttgaattcaaatttgataaatgtcatttgacgggaaataatgggaaagatacacttttttcttacaaaagaatattgacatgttttgaaccatccggttaaattattcgcaatgctttctccaactctaatgttcatctccggcaactacgaagatatgagtttagcgggttttgtgaaggtggtggttttttagagagactaaggcaaactgtggatccgttcatcgttcatccgtgtttggatgtaaactaagaaatcgaatttgtataggtaaaaaatttatcataaaatcttgttcgaaaaaaaacaccaataaagtaagagtagaagctttatcaaatgatatacggatgacccctcaggctaaacatgttataaaatataaataacgttttgtcgatcaaaccactcttgacgaagttcaaatttggcgatccaggccagcggcaacacaacccatctggtacagtctgacccagcccatcttgatgtttaacaggcactcaggccttggttactcaagctgggactgatcattgttcctgcgtgcctgcactatgccaacgctaaccatgagaagtcggtacagaagctgggagctaggaggaagtgactcatatatactctctccattcaacaaaataaataaattctaggcctggtttagttttcaactttttctttaaacttctaacttttatatcacattaaaactttcctacacacataaactttcaatttttccgtcacatagtttcaattttaatcaaacttccaattttagcgtgaactaaacacacccctagacaaatactccatccgtttctaaatatttcacaccgttgacgttttagcacatgtttaaccgtttatcttatttaaaaacttttgtgaaatatgtagaactatatgtatatataaaagtatatttaacaatgaattaaatgataaaaaattaataattacttaaatttttttaataagataaacggtcaaatatatttaaaaaagttaaaagcgttaaatatttagaaacggagacggtagatagtttgggtcgagacgcgcgggcgccgggcggctctcggctctctcgtggagttccgcccgccggcgcagacgacgggggagacgactgcgccgcgcgtcgccgttgcacagggcagcgttcagcgtgtgcgcagggcgcgcgccccacgagtccaccaccggtagctacacgaaaagccattcgttttacgagcgcaaaaggcgctcgcttttgtgttgactttaccctcgaaaagcctgggatcccctcaaaaaacggcgacgcagacgggggaccacgatttacgggtgcatgcatggacggcgccatccgtccgggccacatctctcgtctccattgttggcttgatgccgctaaaacaaacacaacacaccgtagagcttattactgtacgtacaccaggatgcattttactggcagcagcactgcagcaataacgcttgctatggcctggaacagtagtaatattagcgtgtagccgtgtactgctgacaaagcactctgattaccagcagagaagaggtgcgtgtgtggggccgtgggggtgcatccgtccgggggttgttcgtgttgcctgagcgctgacacgctcgcatgtgggatgcgctggatcgacgtttcacgtgctgacttccgtgcacaggcgacgcacgtacgaacgtagtaccgccctctgcgtttgcctttgtccaccgcaacagcacactgcctctgccggcgtggtccaccggcaattgtgatcgtcgtatgctagtagccaattagctccctgttttctcagccagtgattgattgttcgtgtagtcgtgtgccagaaagtgcatcagctctctctaaactctaatggcccctttgatttgtaggaaaaatatagaaattttagaggatttcaattctatgaaaaaaaaatcctatgaagacctttgaaacagaggattgaatcctatacaatcctttaaaattcctatagaatggacaatcctatgcacattttggaggaaagttagcaagaggtctaacctcttggaacatttactttgagtccatctctctcatctgattcctgcatttttcctgtggtccaatcaaacggccattcctgtttttttcctgtgtattcctgctagaatattgtatttttcctattcctctgttttttcattcctacgatttaaaggggccctaaactctctttctctatctctatccacattaacgctggacggctggagattccacttgcgagagaaacaggaagagggctcattcggaatggaggaaatgtgaagaaaaaaatggaggattgatgattcctttgaactgggtactatagatgcattcgtttgaaagggttagctatcttgaattccataggaatactattccctacccatgttttcacaaggaaaaaaagaatccactttagcctctttgttgtaagaatcctgcgcacggagaacaagaaattcttatgtttttcaatcctctgttttacacatacaatcctaccatattcctataatttttctatttcttcgtttttactatctatattccgaataagccatgaaaggttggggtcctgtgaatctgcgacgataggacaacgcgggtgatggggagaagagggggtggggccgggggggaggcgcttcggcttatccacgcacgcccggcagcggaaaaaggactcgtctttgccctttttggtaaagcggaggcaaggagcgagctgacctctagcgtagcaactagcacgacggtggagaaaagggtttttcactaatttgctggagttcacgtttgacgtttccacgtcaatttcgtgggagctttgtcacatgtggtgcttttaacatggaagttataaccagcagtggcttctcttttgaaacaaatgagttttacatgactatgcatggcataataatataattctataggaattaaaaaaagaacgctccaaagaaaccctaagaatgcatggttgagcttgttatcacatgactgataactactccctcacgccgttggctttttgactaatgtttaaccattcgtcttatttaaaatttttgtgcaaatgtaaacatacttatgtcatgcttaaagaaaatttgatgataaatcaagtcacaataaaataaattataattacataaattttttgaataagacgaaaagtcaaacgtttatcaaaaagtcaacggcgtcatacattaaaatacggagggagtatattagttactccctcggtcccataatatagtaacctagtataggatgtgacacttcatacttcatagtacaatagatccgaacatgctttcttttccaggttcgttgtactataaagtgtctgttctagattactactcctatattatgagacggagggagtagggtccatggactggaagaaatgattatgtcttggaaagcatatatacttgtgaaatctcctttacagatggtatataaaatgatctctctcttacaaaagtgaaagggtttgaaaaagggataaggtgcaagcaagttggataaaagctaactgaagattaaatctgaaagatgaagaaatttggatcaatagatgttctttcattagacatgtagagtatgttcagctgctcttttttactgtagctatgtggctgcaactgtaagccaacatcagttgtttgtgtcatgtctggctgtagttgtagccacagtaatgttgcaacccctcctaccgaacataacctgagttgaaaacacgcaatagctgggttctggaattgttgttttggtggtaagcttgttagggtgctgataatgtaagctcaaattcacagcagcgtgttttaggtttatgttgtgagtgttgtgtcggacagttttagcctgtgtttggttttagggatggaaactagtccctcccgcatagaaaactgagcaatccattaatgcataattaattaagtattagctatttttaaaaaaatggattattttgattttttaagtaatttttgtatagaaactttttgcaaaaaacacaccgtttaacagtttgaaaaatgtgcgcgtgaaaaataaggggaaggggctgaaaaaaggggtgcctaatacaccctactctgttcgttttcttagaaagctggatcgtatctctcgatccatctttgatactcttaaaaaagagttggacctaatataacaaattggccacgtttgtggcaaattgtgggactattcagtttgtcgccgcttttaaagtaggtgacaaactagacacatatcaaccattgctatcttactaaattttggtattttcagaagcttcctctctaaaaactctatcaaaataaaatttagcgaaggcatcaaaacaaagtcaacactaaaatttataaaaaaatagaattactaaaatttgatatgattgattcggacaacaaagtgaactaagccatgtgtacctatgaggagtggcagctgtgttcggcatcctcttttcccaacccttctttctcgttttccgcgcgcacgcttttcaaactgctaaacggtgtgttttttgcaacaagtttctatacgaaagatgcttaaaaaaatcaaattaatctaattttggaaaaaaattagctaatacttaattaatcacgcactaatagaccgctccgtttttcgtgtggagggaatgagttcccaactcacatacacgaacacaacaacccacatatatgtgttgtcgcgcatcacggcggcgctggtgccggcgctggtttctgggtgttcgcgtacgagccccgcctagcgacgccagccattggcctccatggagcaccgcctggatggagtaaagaaagaaaaaagaatggggaaagagagagatgacgtggcacgctgacacgtggggcccacgtgggtcccacgctgactcagccgccacgtagacaaaaaccggggtcaaaaccaccgaaggacctcgggtaatcagttttgtatagttaagggaccccgcgtatattctgcggttcgagaatttttttatcctgataacaaattgagggaccttcggtgcactttttcctagaaaatttctgaaggataaagtacaccgaaggtccctcaacttgttgtccagttacaaaatcatccctcaactacaataccagatatatgagatcctttaacttccaaaaccgtttatttgaggtccctcggtggttttgaccccggttttatctgacgtggcagctgagttgcgtgggtcccacatgtcaggatgccacatcattattttcttcttattttttatcttttcttttatttcttctctttccctctcttctcgatgcacccggcgccaaatggggagtggcggtcgttgaggacggccccggccgagctctgcgcggcggagcggaaggcggcgagagccttctcggggagggacacggcggcgtaggagcagaagacaccgacaaggtgcggctcggtgggaggctgagagggaggtgtcgtcgatggccttgaagagggagacggcacggttgggatcgtgcttgcggcagaggtaggtcttggccgctgatgccataaggggcggctcgccagcggtggtagtgaggacacggaggagagcgcggccacgacaatggctccgcacggccctcctctccaccacgctcgttcctcgttagccgccggccacgccggccctcctccccgccgcatcgaaggagacggagcggagctccacggagtcgtccgtggcatcggggctcgacttcgaggacaccatcctcaccctctgcctcccgtgctcccttgccgtcgccgtccccgaccccgaccacaagcgctcctcctccaaagccgacaccgccgacaactcctcccccctcgccacctccggttacgaccagcggctttcccactgcgggcgctgccgacagggtgacgccgacgttggcttccccgcgcctccgccgtggccgtgcttcctcactacggccgccgcgccgtcagggcgctgccgacgccggcctccccgcgcctcgccgccaccgcctgggcgacgccgacgctggcctccctgcgcttccgccgtgcttccccactgcggcggccgccgccaacagggcgatgccgacgccggcctccccgcgccttgctgccaccgactgggcgacgccgacgccggcctccccgcgcctccgccgtgcttcccaactacggccgctgcgccgtcagggcgagaccgacgccggcctcccagcgcctcgccgccaccgcctgggcgacgccgacgccggcctccccgcgcctcgccaccaccacctgggcgagaccgacgccggcctcccagcgcctcgccgccaccgcctgggcgacgccgacgccggcctccccgcgcctccgccatgcttccccactacggccaccgccgtcgccgttgcggtgctgccctcctcctctctcgctgccctggctagcttgcagattagtgagagagagatatgagtaaagggagagaagcgggggaagagaagagagaggaggctgacgtggattacgctgacatgtggggcctatgtgggtcccacgctaactcagcagccacgtaggataaaactggggtcaaaactgccgagggaccttttgtgaccggttttgattagttatgggacgcggaatatctggttttgcggtttgaggacgattttgtatctcgataacaagttgagagaccttgggtgtactttttccatttctgaacttccgatgcgtaataaggctttagtcccacaactgacgtcgaactaggcccatatacacatggattaagcccacctgcggccgccgaacagtggcgtcgtgcagctcgggctctggaaaaaagagagaggcgcatctgtttcctttcctcccaaaaagtggccgcggaaaatttcgaattccccccacccgtcgtcggcggcgaccgcgggtgcccaagcccaaccccccgccgccgctcccctcgccgtccgccgacccacaccaccaccactcaggaccccctcataccaggcatggaggagagcgacgagaccgccgtggaggcggcgctggggctgagcgcctcgttcttcgtcaactcggtcctcaacgcggtcgacgacgtccgctacggggccttcgagtactgcctccagtaaggctaccgaaccctctctacttctcctccccccctttctcgctcgccccctctttcgctgctcggttgttcgttaacttgccctcttgctgttcttctctcttctccagggaaggcgcccccgaggccgtcggcgccgccatggcgacccagaaggccgaggagctggagcgggtaagttccccccccaaccactggatttcatgaagcgtgccggccccctcagtttttttccctttaaaaaaataatccggttctggaacgcgatttcccattccacgattcgatagaaggtgtcttgtatggtgtggttgtgtttttagacgaattccatctttgtgcgtcgggttcttaacaatgcttgatcgtagtcttagggtagcttcacctgccttagcgctcgtgatgttcaccaatttatcagccttagcactctcagactcagcgttcaccaatttatcggggtcagccagcggttatgactagtagacattgatcaattttggttcatttcaaggctcaagctggctattggatcctatatcaaaggaatttatgcggctatgtggatgtgcctttcagcagttcagctgcagaactatgattacttgttttgtagccccttttgtacaggatgtgacgtgccgtccttcttttttcaattcagatgacttttccgtgctgcacagtgtgtagtatcagaccatcagtaccactttgcaatggcctataaaacacatatgtttctatttgcatatatgcttgataaacaaacttgtgcggaaactttctacgcataaatttaaaaccaaatgaattactaagtgtggctttcttgtaaagctgggtcaatcaatgatttatcttctaaaaagaaaaattaaaacacaaatggattactgagtgtaaatattgaaacagctagaaaaataccaaagcaaagcatggttccagataacaattctttcgattgttagcttctctgttttcatatttttgctatagaatggatattgttcatttggtttcagaactatggaatggatattgttcattttgttttaaaaaaaagataccacttattgtggtcaaaagcaactatggacctatcaggctagctctccttggaagcattacattactttaacacttctaatgatttagtagccctatgagttatcatgtatcatatttaataacaattgctttgttttatcatggtgcagtaatgtttttagtatattttattctggaagctattgcatatcgttcatatgtttgtcaattggcacatgtttcccccaatagaccagtccagcttgaacgttctgaaaagtatagttcttcttatgattttctttttagggtgtaatcagcattcacaacttggtgaaggatgtattggataagagaatgagcaattgggagaaatactgccttcgacattgtttcgcaatacctgaaggattcctgacacgtgaagatgtatgttcctcatattgaagtgattggtttatttaatttttttgtgaggttgaagtgattgatttagtgaagtcaagatatttaattatactacatcatgtttcttttggaattcatattgtgtcaaagttgtacagtcttcattttcatatgttcttatgatgaagcagaacatacaattctgtttcctgaaaccttgctttacttttatgtttacttcaatgttctatttcaaaaaatggtgtcatgaagatggttaaacatgagttgttttcttcatcaggatattcctgcaaaaaaatcactcaatgatgggaattctgattcggatctcgatgctgaacttgtttctcttaggaaaaaacttgaagatgtaagcagcttacttaaatgaattagcttctctatatctgcatttatatgacaaacacatgttgtttcatcaggctaacaatgaatctgaagaacttcaaaaagagctttcttccttagaaagacaagctgagtgccagagaaatttggattcctctatggctgaattattgaaggtgtttgaaagcaaggcctttcaagacaattttcaaggtatgacattagattcagtagttgtgtacaacaggaggaagagaaatccacgccatttgattatgattaaacatcaattaagtttcacgctgcttttgtttttcacaaatagttatttggcatgcttaagctgcagtttcacttcgatattgctggcattaaaagacttttattttatttaggccaatgcctttccatgaaataaggcttacaattttgaatttttcaagtgatcagaactccaacctgttcacttatggttgggtaattattgttgacataatttgagtaattgtgatgatgctgatgttatatccttccttgtcaccttgtttgacaattgacatgctacatggcagattgttagtaattgtaacgtatggtgcatattggttatgggttacttcgcatggttaaaaaactagtaagcttcagccactggcatcaacaattttgagtttcagaaagcaaaatattcttgcccgccgcccaaattctatgacatttcttaatctgcttttgttaatttgtttatgtcacgtacaaatacagttcaatgttgtttataggatctcgatactaactacaaaggagtaaattcttcataagtatgatttttgggcagcctggttaactctggttcagaacatgcctgactaactgtgctatacctgcagatcttgtgaacgtaataccactatttcagcggaaactggaaggtatgaaaaggaagattgttgagaacattgacgatcaaattgattggaacgtcaatggacaccacaagcggttagcatcaggtaatccattttcccctctatctcgccacatttcctgtgcgtgcatttgctcgtttgccgtaatctttactcactaccttagcaccttgcctcgcaggtttcactgccagaacagaagacagtcaagatgttgtgaatgtcttaaagaagtattagtagctcccacttttatgcgacctgtgcgataacaggacgcctgctatgtgctatccttcgtagcacgggataagctggttatatgtttggactcttgctaactgagtaccgccaatgcagatcttcaatgtaatcctgaactgcgattccttccgaacaatttgtacgtaaacgtaaagtacatgggctttccataattggtttatacgtggttatttctccggatggccggatagaaccactatcgtattgttcacgtactggttctcagtgcgaccgaattttggtatggttcacataaaaggcctgaacacatccccaaaggcccaaacgcacacgagacaatcacaaaacgcaacgagaaaaggaagacggtattcattccaaataaaatttggcaggtgatgagatgaattaccttttaacaatgtcgagcaaatccgtatgaaaaaaaagaagaattcacaaatagcatcatgtagaacaggggagagggcctagcgacgcggccagcccaaataggcccagagatcggaaggcaaaggggctcattgatgccgtcactctaaaaagaaaagggaaaataaataaataaaattaaaaacaaaacaaaaaaactcgtggcacacgacgaaggcgacgcacaaatctccagaactcggggggcacaagcacaactttatatggagtcgaggacgacgcgtcgcccccatccaaggcaccgcagcgggcgcgccccaccaccgggccctcctccccctctccgccctcgccaccccgctcctccccttccttccccgcagtggtcccgcaaaaaccctagccatcccgccgcctccgccgccgacgacgacatggacgacgacgccatcacggcgctgatggacatcgacgactccccccgcagcagcggcgccggcgccgtcttcctcgacgacgaggaggacgcggaggtcttccccggccaccgcgcggcccgcgccaacgaggcccgcgggcccctccccttcgccggcttctacaactccttcgacggcgccgacttcgacgacaccgacctcgcctgaggcgcttacggtaacgtgtgggggccggtgctcttgtggggggctctcctggaagtttgagaggctgatctgtctctatggtgatggattcttctagttagttcgtcggttagatttcttttcatgtatctcgagacgtcgtgagatcaatctgggtaccttttgctgccgatgtttttgaatctctatgccttgcctgcattgttggttgcttggttagtgcttttggctcttgattggtaccaatctctgcgaggttttcttaaattctcgtagtactttgattcacaagatagatttttgtttatatatgttggcttcaatgtgcgcgatgttggaagcaggtgggtgtaacgtcgatgtcacattgatcgattggcttcgatttttcctgctagagttttccacaacaggaatatctggagggtccagacgtactgttgcaatgggataattagcagcctcatccaatcagtagtggcgttgcagtggaaactccattagcacggcgaattaacctaaataaaagtctctaccacgcaaatttctgtctgaaattgcagaggaaatacttttatgtttgtaacccatgagcactagttggagtcagtcgggaaaggaccagcctcatgtcacattgctagttctagctagaaggtgttgatgttgggtgtaaagtgcgttcatgagtcaacaagctgcttctgattgttgattagtaatattaaatgctttcaagagtaccaaactgctattgggttgaattgtgctacagttggggatgatttgatgccaatttaatagatttgacaaactgtttggtagtactggtagtggctatctccacttcacaacaaaaaaaagtttggggatcctatggtagatttgatcaatttctcttgaaattagttctaacttgcaagtagcctaaaaacagccctcattttgtttaccatgaggctatgccatctagagttctgaagcgagagtgttcaagcaatgattgtttccatatgagattgcatgtctttgcttctaactgactgaaacaatgtcaacaagatctgcaatttagaatttatctatattgattatcctattggccccgcgaaaaagtgattatcacattgaatgtgctattgaatattatttctgatttgtccatcagttgaatttgtcatccagaaaagtggtgaaaataaattttcagatattccgtcctctgatatttggctagacgaggtgaaaatgaaagacgagactgttttcacgttcacttggctgctgcatttgactgctggttgcctgattgattgttagactgctaccaagggagaaacgtcaagttgtggtatcattccatttcttgtttccgagatctaccacttgcgtgaactgtttatccgccagcagctggtcctcgttcttggctccagctttgccgctgatctgttgttttgtgaacttgcaatgctggaaatctttcaagtttcaaccaaaacgtcactgtagcgtctaattgacagtacctgcttgaaacttgaagtttgatccgtgctatgtttctgttaccacttagcttctgagttctgtgacgcgattcttcacttctgcgggattgcttgtttcttactgctacaacctagtagctgactccctcaactgtgtgaacaaacaattttacctgaaagatttggaatccagatactaaggccgtgtttagttttccccctattatcaactttccatcatattatattacatcaaaaaattttctacacataaactttcaactttttttttctgaactcccaactttcttcgaacttccaatttttttcaggaactaaacacaccctaatgtagcattgcattagcatgttgacaaaagatactgtaataaagaattggttgaacagcatgttgacaaaagatactgtaataaagaattggttgttcaaccagtttctcttcagaggggagaactgccatggtgccgcgggtaggccattatctggcgtattgttggcttgttgtaatggaccctgcaattttcctgattaggcccctcctaaacccgaccaacagtttgttacaaaaagcgggcatttcgtgtttcgttgttttaactcgaattccgtcgtattgtaccgaatcataccagattctacgatttcatttgcaaactcaaagctgaagcgcgatccacgccctgtttgactctctgtcgtcttgtgtcacgctgccgccgcgagaaaagcacaaacgatccgcgccctccggcagctgcgccggcgccggccacgcgtcgcgcgcccactggccccacatgtttcggggagcacggcgtacgaacaggggaaaaggatgggtgtatcatcccctcatccatcgaagccgtcgcatcgccaccgtccatcggcgcataggccagttcgcccggcagagggccccgctgccgcgccagccaagccagccgtccgatcgcatctcgcggtcccgtccgccgcacgtgtcccgcccgcacgggcggggggaaggaaggaaggaggccatgtggcctgtcgccgcacgggatcccgggccggcgggggctggcggtcaatggcctggtcgtatggtgggccccgcccgaggcgccacgtcagcgaagcggatagggacggcggggttttaaccccttcgtcgtcgcgcggctcgcggttgatcgcgagctctagctgttttgaccgcttctccggtggtggcgtggtgtgtgattgtgtggtgtgtggtcggtgggtctcgttcttctcgtgacaaattcggtggaggttgctttcaagtttgcagccggctgagagttgtttctttgccccccgagctcaacaattatctctgatactgtatgtctctgtttatttatgtaatgttcactaagctgtctaagcatgtgtttcatatgacgacggtttttcttttcatgtgcgatgaacggtgtggcctccatgagaattgaccacttgttatccgccccacaaccaaattttcaatagatataaatatattgtactaagttgctaggggtaatgtagtatatgcaatgattgatcgacgaaataatgtctaaagtttcatcggtcaaacaacgatacttgctagactgattgccacaatatattattgctagaccggttgcataatagaatgtgttaggaatcaaattcaactttatccaactaaatggttaaggaccaagttcaatggctaccttagtcgttagcccgggcaaccaggaatagttgtacatagtttttattttctttttaccttgttcaatattttctgctctatttattgaatttggcggctcgccaattcgtttaagaactgaatggtttggaggtggttagagccacaagttcaaagaggtacatagttttacgtaaagagaaaaagattagataggacaaggatagaacaggtagataagatgtcgcattactcctcttattgactgatcaacttttaataataacgtaaagcatttaaaatatctaattatgcaacataaaagtgtcattttacattgtaatgtacctaacaaaagttatacattcagagtggttcgcatttatatctctaaacttaaaacttaaagagtcaaaagccacatgtttgtgaaaaaatcaaatttgataagtattaccaatataggagtatagaatacacttatgtttgctatcacattgacaagtagggttgggccttaaaacaacaataggtaaatgttgtggatacataagttgttgtgtgaatatttccttttcaataatattcccttggttccaaaataacttaatttttcactatcttatttgcacaaagttaatgcaccatggctcttggctgtctgaccgcagcttattagtctgcaacagcaagccatggcattgctgtttcatgtagcaaacagttgtacgggagcaatcaagcaggcacaaaaaatgttagaaaaacataatatatctcatttccaaacaagttttattaaaaaaaaaccaaagtatatgttcgtgtcatggatatgtgtttaatgctaattttgatacaaatatcaaaatactactactccctccggtttagaatataaatatttctggctatgtatctctacacatatctaaaaatacttatattttagatgaagagtacaaataagagaaaattctctcataaaaggtaatatcgcctttctaaaatataagggattttgtccatctaataacataggcaaaatattttactacttccatcccaaaatataaaaacttttagttattacatccgtctcaaaatataagaagttaggattgaatgagatattctttaggactattaatttggataggatgaatttggacagcctgtccagattcgtagtaccacgaaatattagatccaatcattggttcttatattttgggataaagagagtatgaatttggataactacatcttcagatttatcactaaaaatacttatattttaaaacggatatagtatattttagagcagagatagtaagcaacatagagctattttggcctcataggaagaggataaaattgacttgtttccattcagaaaaaaatatgtataatattgacttgtcccaaatgatatacacatgctgggtaaaaataatataatattattgcacacacttgtatatattaaaaacatgaaggaaggagattcctcttgcccttgttttgatacaggaaagccatcagtccaactgccctctcttggagccttcccccctcgcgagaactagaagtagaagaactcatcatctcacctcccaaactgacacaaccctccttaactcattcctcctactcctaactgcaagctactgctcaccctctcccggtctccctcctctcctcctcgacctcgcgcgcgagctcatggcctcgagctcaaacccggacaccatggacacggaccctcccggcggcggcggcaccctctccatcgccgtggagcgcaacccgccggagtcgcgcctgctccagctaggcgtcaagtcctggcccaagtgagtcgccacagtgccgatcgatcgctgtccatttcctgctccttcatggcgtacgtgtttaattgagcgcgtgggcgggtgcgtgcgtgcgcaggtggggttgcccgacggggaagttcccggtgaagttcgacgcgcgggagacgtgctacctggtgaaggggaaggtgagggcgcacatcaagggctcgtcggagtgcgtggagttcggcgccggcgacctcgtcgtcttccccaaggggctaagctgcacctgggacgtcctcgccgccgtcgacaagtactacaagttcgattcatcttgacgtctgtctcgtcgtcgatcgatctctctccctcgccgaattcggtgactaattcgcttcctgattagttcggtgactgcgcttagcctcattctgtagctaatttgttgctagataattaagcccgtgcctaatgtgataatgtctcttcttctctgcgtgtaaaaaaaaaatggtgtgcgagggggcaggggcatctagcccctgagaggctagtggttattcaggagccccaaaaaccggtcaatgcaggggctgttcaaagtattcttgtttattcctccgagtgcaatccactttgaatgctctctttgaccggcgccactagactccattaattgtcttttgttttcatttcctgcgccgtttctctttgtaggtgcatttgattttcctgctctcgggcgaaggcagtggaaaattttattttctgaacgttattctaaacaaattttgaaataaacccttctacacgttatgtacgattgggaacatttacaacaacacaactataaatggtaccgtaagataatacttttacgccgtgaaaaaaattggtgcgacaaggattatggcatttcagtatatcaacataaaagcgttgttacatggttaattatgccatgtcaattatagtggtgtggataataggtttttcagaataataaagaagtgagactcgaatactcgatattagcgggacttcgctttgagctttccatcagggttttccgctattcttttgaaccaaaatctttaaagtataaaataaaaaatattaatactttggttgttttttattataattttcttggtgcaaccaaatttctatattgaataaaatacaaaatctcaaagctatagacgcgatactctagcctgttttgaaggaattggttgttttcattggttgccaaatttccctgatgcaatatgaactattttctttttgaaaacaaaatctaaaatatgcaataatgtttttactatgtaaagttttaccatccctaaccaatcacaccttgagtctccaaaaaagccaaacatagccaaactatttcaacatcagcttaaagatttgaattattttatttaaaaatgagtaatggggctaagtgcctcaggagatatttcacagcattataatgttaatatgacacctttttcagtgcacatggttagtcatttggtgtattttgggccaatgcttaaaatataatgccgtcataactttagagcggaagtgtcattttatgatggtacttaaaaattggtgagattccaattaagaggaatcaaaagtattcaaaattgttttcttcgattacttggaacgcacatatacacaagctagtgcgtccataacacaagcataaagagacatactcactatgtcccacaaaaaaatgaatctaaaactggatgtgacatattatagtacaacgaatctggacaaatatatcacattcagtactactccctccgtcccaaaaaaaagacaaaccctaggtttccgtgtccaactttaactgtccgtcttatataaattttttttataattcgtattttcattgttgttagatgataaaaatatgattaatattttatgtgtgacttgtctttttaattttttttcataattttttcaaataagacggacggtcaaacgttggacacggaaaccagggtttgtctttttttgggacggagggagtagtttggtttttttgggagggagggagtaactaacaacaattacttggtcccactaaattttcattgaaaatgaactaatatgtgagtatgtcgtccaactccctccgttacattaaaactaatctagtaccggatgtgacacatcctagttattattatgaatctggacatatgtatgttacatccggttctagattcgtttttaataggacagagggagtaggatttagattctataagttggagtcatgtaaccataagtctatcgcacagttatcgctgcttaaaaacattataattgttccaatggatgaattagaagttaggtacaaatcaaacaaaccaaagtgcagctacccagatattttctggacttagttcattgcacatagatcagtgagtgataagtggattggatcacacgaaataaaattatgagatggtgatgcatgaaaaatggccaattcattgatttgcctgtcagtcgctatctgcagcgtctttactcgcaccgatagcaacactatttacgccgtgtttagttttaaaatatttcttcaaacttcaaatttttctatcatatcaaaactcccctatagacataaacttccaactttttcattatatcgtttcaatttcaaccaaactttcaattttagcgtaaactaaacacagccttactagccacacaatccgtttcattcaggcaggagggaaaatgggggtatggtacaaaagagaatataccgaatccttggatggtagtagcagctatttggttcccccgagctagtggatcgagcactaggttgagagctcggaattgatggttcgttggacgcatggtccatggcaactagccatggatgggtcggtcggcgactctagctagcagctgcgtgtgtgtgtgcgtgtggcagtggtggtttctgaacctgtgatcaggcagccatggccggccgcccgggcgtcttgctgccctagaagcaggtggtccggcctactattattcacttaagccaccgaaagtgtggttgttgcagcatgtgagcgagtgaagttgcttgctttactttgactcgtcctgtggctgttcatgcctctctctctctctctctctctcggtgtgcattcactcacattcagtgagtgccttttgactgacgaatggatgaataccataccttgcatctctcatctctggcagccggccggcaggaggatcactggatcagcatgagattttttttcccctgatttttctgtggttttggccgggcactctgtttgtgtggatatcgttgcgagttgtgctgctgctgctgaggctgagcacgaatggtgctgtggtgccctccccgttcccagcgcattcgtgctgctggtagcttttgtgccacccgcagaccctgcattaccccggtcctcacggtttgcaggagctactgtttcttcgcagcacccttgcctgtcggctgtcgcttcccagcttgaatacgctgctgtactctttgtcgtcgcctgcctctgcctgagacatgtgtggactgtggagtagtagttgccatggttctttgctttgatgcgcagggttaaattaccatgtctagccaattaaggtgtttttttttgtagccagctgttttgttcaatgtcagtattatgtttgacatcatccaaagttatctcgctgtttaggatagccgcacaagattgtacacctgaccagggagctccactcagctaccggatcttgaccgggaacctgtttgtctacgtactccaacgccttgaatgatgccgccgtgcagccaattttaaccagctgctgcgcaaccggccaaccgcccagccgtgcagctgtggtggagtgaccacggccacgactccgtgcgcgcgggtggacgtaagcgttgggccctcggctcgcgcgcgcggccgcatccggcgatgcatcggtcgcgttcgcggtttgtggcttcgcgtcatcgccgatgcgaacagaggctgctttgcgttgtcgtcatcggcttgttggcgagttgctctgttcctctctcgcgcgcgctgcagatatccgaggtggaaaaaatatactacatatgaacagatgtggcccagctgtgagcaagacgccaagaccaaagataagtgcagttcaaatgggcctgaaattgggcctccatcaattacaaagcccgtgaaaagtttcagaaaagcattacaaagcttcagataagttcaggggtgactgaaatacacatacaacagtaacgtagagagatccccaaatcagctgcggcagaaggcagaaaccgtgactagtatatctcataaacttaacgagcagtacaatttctgtacattggtttatcaataagtcaagagtagcatttgggtaagaagagaaaaaaaatcttttacggtggcgtttattgacatttgatccctggagccgagaagactagtttatctcatccgtgaaaactatttgtcactagacatcaacgtctcgctgaggacacccggtttgcaatttgctaataagaaacactcgtttccgtccaatggcgattcgtttactagagatccgtccattctctgaacttctgaaggtcaaccttctgatatgcatacaggtgtggtagcaggcacgacaaaagtataaaacaataggtatttaatcgcatcagcgtgatctatctccagagtgtaaaaattagatacgcagcatctgcaagtcatacttgcaaggaagaagcaattgcgtccctatccaccacatcttatccagtcttgtcagagttttgacctaaggaattgcttcatcatctgaatttattctactggaagaaattacctactgctatgccaagaagtaagaatacatggttaatctatgttgacaccctcatttctgaagacaaacaacataaatttgcagtgagttaaaacatatagtttcagtgaaaatatcgtacaggttaatgtagccagaccaacacagagatctgattgacaattacagagtactcagtagtcagcaagcaggtttagcatggactacctgttgattacatggtttcagtcagacacgagttcttcagggaggcaaattaatcacaaggttcttccaagacagaagccgccggtatggtatggaagcaaatgggtttatctccgtttgtgccaataaccttatcgaatatctaatcgttcgctaagtacgcattgcacacatcatataccatctcgattgatgagttttgtcgccatgttctgctaggtacgacctatccgctgctgggtttacatgcatgcctgaagaacttaaacagttaatcaacaaagtcaatggatattacgcatacaagtatatggttgtatatatgcaacttcatgacacaacagtatgcgtatagtcggacgtgacgacaagcaactacctcgtgcaaggatgcgaggagataccagattaaaacctgtaatacttgaagttgacaaaatgcgattcttcagacgatataataacaagaacatttctgaatcttcctttaaaaaatgttgaatgcataaaagaatcttagctgtgatggcaacaacacgactttctgatagtgacattggatcttagttgaatctggcatcttgcgtatgcgaccttgcttggatctgtcggatactcccaacccagcataaattactgatgtctgaaactttctgagcaaagcgggaactcaggctagttgagtcgctcatcatcaaaagtcaagacaatacttaagtaaaaacaaaacaaatatcactgtcgcaaaaccagtgtaaacctattgggataattttaacagtcttacaacaccagcgccgagacgtctaggtaacaaattaaatcatcactgacaatttttgaagataagtgaatcacatgtctttctcaatgaacttaaatttatgaatgaaccaacctatacatgaaactaaatatgatatcaagatcagttaaaaatcttgttttgtgaaatttcaaaacaaaaaaataaaattgcagcgtacctttatttcaagagaaatttaattcactaaaaaaaagtaattgtatgtgccaaattttacattaaaaaatggtatctgcaatgtattcttaaggatgataaaattatctcagtaatattcaatcattcattaatagaggtgaactgctcgttcttttactcatcacacctgttggatgaaaagattggttgctgccactaaaaaaattaatcaactcattgcagttggcaaaaaagaaaaaaaaaggttttcaggcactagtatatgtgatgttagaagggaaactattctaatccctcgaggggatgttccctcgtttactcaaaaaccatctaaacggttatgaaaaattctgaaaaaaattgacaacattcatacaacacatatatacaacttcacaaaatcttaagtccaaaatcaactcacacttcgagatataaaaaagacaaattcagcgtatgaatagtagcgtactgtttatatctaaatttgtcttttttgtttctcgatgtgtagatcgaatttgaatatgaattttggtggactagtaggtatcattatactctacattgttaatttttttcagattttttccatagctatttacatcgaatttggaagaaaaaggtatacgaggggatatccccttgaggtattagaatccactcccatgttagaaggaatccaaaacagtatacatgcatccacgcgcacctcggttttgcatttcccgctgtctgtgatcacgaatcatccaattaaaaacaaccatcaaccatggattccaatgtgttctgcccctataaatagtccagcatctcattctctcgtctacttcaaagaatcacacaccaaaacctccattagttcctaaaccctagcaagaagcagcacaaaaccttgccacacttggctagtgagacacaccatggcgacgtgcttggacagcctcgggccgctgctcggcggcgcggcgaactccaccgacgcggccaactacatctgcaacaggttcacggacacctcctccgcggtggacgcgacgtacctgctcttctcggcctacctcgtgttcgccatgcagctcgggttcgccatgctctgcgcgggctccgtccgcgccaagaactccatgaacatcatgctcaccaacgtgctcgacgccgccgccggcgcgctcttctactacctcttcggcttcgccttcgcgttcgggacgccgtccaagggcttcatcgggaagcagttcttcgggctgaagcacatgccgcagacagggtacgactacgacttcttcctcttccagtgggccttcgccatcgccgccgccggcatcacgtccggttccatcgccgagcggacgcgcttcagcgcgtatctcatctactccgccttcctcaccgggttcgtgtacccggtggtgtcgcactggttctggtccaccgacgggtgggcttcggccggccggttgacgggtccgttgctgttcaagtcgggcgtcatcgacttcgccggctccggcgtcgtccatctggtcggtggcattgctggcctgtggggtgccttcatcgagggccctcgcatcgggcggttcgacgccgccggccgcacggtggcgatgaaagggcacagcgcctcactggtcgtgctcggcaccttcctgctgtggttcgggtggttcggcttcaacccggggtccttcaccaccatctccaagatctacggcgagtcgggcacgatcgacgggcagtggtcggcggtgggccgcaccgccgtgacgacgtcgctggcggggagcgtcgccgcgctgacgacgctctacggcaagagatggctgacggggcactggaacgtgaccgacgtctgcaacggtctcctcggcggcttcgccgcgatcaccgcgggctgctccgtggtcgacccgtgggcgtcggtgatctgcgggttcgtgtcggcgtgggtcctcatcggctgcaacaagctgtcgctgattctcaagttcgacgacccgctggaggcgacgcagctgcacgccgggtgcggcgcgtgggggatcatcttcaccgcgctgttcgcgcgcagggagtacgtcgagctgatctacggggtgccggggaggccgtacgggctgttcatgggcggcggcgggaggcttctcgcggcgcacatcgtgcagatcctggtgatcgtcgggtgggtcagcgccaccatggggacgctcttctacgtgctgcacaggttcgggctgctccgcgtctcgcccgcgacagagatggaaggcatggacccgacgtgccacggcgggttcgggtacgtggacgaggacgaaggcgagcgccgcgtcagggccaagtcggcggcggagacggctcgcgtggagcccagaaagtcgccggagcaagccgcggcgggccagtttgtgtagtaggatcatatcgatcgtgtccgtttggggaaagtgttttgtgaagtgtgcatatataagctgaggcagtcgtgtgggcgtggtggcacttcagcccatggtggttgtggctttcttttgatatttgcttcctttcttctctgcatttgcacctgtatggatttttgtggctttcttgtacatgtttagacgtgtcctgtttgtatcagtatttaggtcattatgatgttaacgtggagctcggcatatgccatttgggagaatcgctgcgagatggtccaaagtatcctcctatggagaaactagcttgtactagactactgctatagtagtactacaagttttttttttaacgatcagcaccaccagacaacacgatgattcgttgaatagtagtacaaggctagtatcttggaagacagtagccaggaaagggaagaaaaaaatttcaccaccacgcactaacaacaaatacacatagttcaggagaaagcttgcactggaccgaccatcgcaaagcgtgattggtcgccactagaccaacaagcaaactacagctaagaccgcccaaaaccaagccctacggttgaccaccgatctcaattctagccatgtatttgagattgagagggagagggtgagagagaagaaggaactactctccctcctagggcccgccaacgtggtcgacttgcataacctagagcatcgtcacaagagcacaagacatctagagcgagcatgcaccagctgcctaagaggagttttggcaagggaccttcctagacgacatctctagggagaagagcgacgatgagcaccgctgctcctctccatcaaggtcttagagagaaccaagacagggttttcacgcggcagcctagttagaggaagaggatggctcgacaacacttctgagagggaagacgacgcccaaagcgccatcgttggtggcccggccaagatcgggctaggtttacactgggtcgctcttcccttgtagatccatagctaacgctctattgctccaccatcaaccatcctccattgacgcgtggacactgctccaccgacgccccctgtagttgtgcctcccgcgtccacccgctctccgcacagtcgccggctgtacctcctagccaagctggcctcttgtcgctgtcgaccacgtcttcacgcactgcgtcggcccgccgatagcaccttcacgcgccgcaccagcctccccgcgcaatgccgacgccactccgcaccccctgctcccgccgtcgctaggtagccgagcaatttaccacgtcgcaacagctgcgcctcagccccctcctccacacccatcgatcggctgtcggcctgaccagagtccctaacaagagagtgatggagaggagaaagggagagaagatgggaaagagagagatgacgtggacagtctgacatgtgggacccacgtgggtcccacgctgactcagctgccacatagactaaaatcggaatcaaaatcaccgaaggacctcgcgtgatcggttttgtatagttaagagaccccgcatatctggttttgtggttcgaggacgtttttctatcccgatgacaagctgagggacctttggtgtactttttccgctaaggaacgtatggctgaggcccaatcgcaaagtaggcccagccgcccaacccccaagtgacagatgagccatgaaaggccttccttacgcttctgcgaacggcctattatgaccgcttgccctgcggactgcggactgcggcctgcactcccccgcgcgccccgttcgtcctgcatggctgcatccccgcgcgcaccgtgcggtagtggcttctcgcacggaagggactcggagagacggagagcgtcgttctccgcgcggttcagggcttcaggccgcgccgccgtgcgccattgcctacatctgcatgtgccgcgcttcccgtgcggctcgcggctcgccgttgatgatccgcgccctccctctccgctcctctccgtggtgcttcctccacagatagaagccggctgcccaggaggcgatcatgagaacgtggaaaactaaaaacaatacagcacggtaccacacgacgtaccacccccacctctcgagcatttcgatttctcggccccccctatcacgacggcgacatttccgtgttcctgattaagataagaactgtatatacactatacagcatacggttagttggatcagaggtacggagtaaaaaaacaatatatctgcgtttttttaaaaaagaaaacaagagcaagccgattcctccgccgcaacgtacgtacgcaagcgtggaaaatgggtaaattcaacggccctcctgttgacgtagcgagctcgagcaatcgccatctcgaagggtccagaaacagtaacagctgtcatcaaaattcaagctgcaataaattacgaaacgaaccaacgctcgagcacagatgcaggtgagctcgatcagattcagaactgaatcacaggcagcgaactctttttttctgtacattctgatttctaaatgaagctcaacgttacgatacgccaaactagtgctcaatgagtacaatatacgacctcctcggatcgcgtacccctgacaccatgaaacggttggcaggtaatacggtttgaaatcggaaatactccgtttcacatgatagtacagtacaattgcgctcgcgtttcacatgataggtcacactattctgtcaggagcaaacagctaaaacattttcataagattcagcaaatgaggggagaggccaaatccactgtaaactcaaaatactataatcggcagcaggacggtgatgtcagacgaaaaacagagaggagaacacttccttaatcacaatccacaagtcaacggcagatccagacaccgcatatgtgtttccggactctggattcaggcatagtttactcgggagcagctcttcgggacacggaagatgcacactggatggcatggaggtcagggggaataatcgaacatgcgaaatggaaattggctagttgtggagcgtcaactgggagcttatcttattactaattagtattaccattgccattacgtctgaaacagacggggctcccatttctttttgatgtcgttagtacagccggcttcgtttttcttttctggctgtctcggctgtcacctgtcagtctcgtcagcaactggggtgttccgccgacgagggcgccgtggacttcgcgggctcgcggcgatggcgatgcgcgctccaactgcggcgggtctcaccgggctgcgtgcgtacgccgatatgcctgcccatctcgggatcggttgtttttatgcctctcgccgtggtctcgcggtcggcacgatggtcgcatcgtcgtgcgtgagctgcctatcgacaggtggtgtgccaatgaggagatacgttgatctgtggtttccaaaagtccggtgcaaaatgggagatagctgcgatggcttatttacttgggtggtgcacacttgtacaggttagcttgacagttagagaagtacgtactcctataaaagatttccaggaattctcgtgctggactttttcgcgagcacctgcactttgagcatgaggtgcaacggctgatcttcttcgatgatagacaacgaaaatttcaggtgggtagagaagtaccatgaacgataatactacctccgttttttaatatatgacgccgttgactttttctcacgtgtttgatcattcgtcttattcaaaaattttatacaaatatataagatataagtcacacttaaagtattataagtgataaaacaactcataacaaaataaattataattacgtaaatttttttgaataaaataaatgatcaaacatgtgagaaaaagtcaacagcgtcatctattaaaaaacagagggagtacatgttcaacagggacgcggtttttctacacctaggtgcagctgcacctagggcgtctgccgcccgatcgattaagcgattcgtgatgatttctcaggtttctcacatatagcaggtgggtatcgtgtacgtccgaatcttgaggcgcatctagcggtaatgagcctaggtgcagctcacctaggttcagaaaatactttcccgttcaaccagcaccagccgcttaaaaaggcagagcgacaatcattacatgatggtagagttacaggaaaaacacaacattaatcattgggttcaattcgtagccctgtgttttggtgaaagcttcaaaagtactccatgaataccaaaatataaggatttttagaattcaattgcatcacaatataagtagtagtttccatcattccgattatctcaatgatttcatagctaatcatatgcttggaagggtttagggaatccaagcaattcaaaattcaaaaaattaactatactaaagtaaaaaaagactatgacctaacctcaatgtttgttaaacaatttaggccttgtttgattccacttagaattattataatctgattattattaggagtaagctgaaacaaacagataacttattatgatagattattataatctataagccagattactataatctggtaatccactctaaaggtgctttttttaattattggatagctaataactagcaaacagctaataatccagataaacaaacagctaacaacttattctatatcggtttattataatcttattataattcagtttatagtaatctagctcaataatatatattataataatcttaaactgaaacaaacagggccttagaaattcatatgttttgaaatggagatagtaccactcagaaagcttgaaggatttcatgtgttttggttaacatattcatgtgtgtcttttcgtgcaaccaaaattttctttagaaacatggtgaaccaattagatttagaaattataaaatatttccaagtgttacaagtggaaatataataaaaataatattgttaaaaaagtaaagaaagtttaagtacaaacagaggaggaaatataacaagtgcttcactatagacaaatatagaggaggacgaaatgtacaaacagtcgtttttactttttaaaagaaagtacaaaccactgtattgcgactcaggcgttgtttagatcccagaaaattttagccaaaaatatcacatcaaatgtttggacacatgcataaggcattaaatatgggattgcgagacaaatcttttgagtctaattacgtcatgatttgaccatgtgatgctatagtaaacatttactaatgacatattgattaggcttaataaattcatctcgcaatttataagcagaatctataatttattttattattagtctatatttaatacttcaaaatatgtatgcgtgtacttcaaaaactttatatcaaaaaactaaacacagcctccaggccgcagcctacagtaggcctatagagagattccacgggattcgatgaactacgaccacgaacaggagggggacaaatcaacaagcaaatcataggggtcccacatttcagaggtagccaaagattcactggcaggtgggcccttcacactttgaaggaatcaacaacgacaccccccaagtcatggattccttctcgctccctctccacgtcgcctataaatccgacgcggccgctccccactccacccacagcccacacttccattgctcctcccctctcctctacagtctgtgttgagcgcgcgtcgaggcggcgaggatggcaacgtgcgcggataccctcggcccgctgctgggcacggcggcggcgaacgcgacggactacctgtgcaaccagttcgcggacacgacgtcggccgtggactcgacgtacctgctcttctcggcgtacctcgtgttcgccatgcagctcggcttcgccatgctctgcgccgggtccgtccgcgccaagaacaccatgaacatcatgcttaccaacgtgctcgacgccgccgccggcgcgctcttctactacctcttcggcttcgccttcgccttcggggcgccgtccaacggcttcatcgggaagcacttcttcggcctcaagcaggtcccacaggtcggcttcgactacagcttcttcctcttccagtgggccttcgccatcgccgccgcgggcatcacgtccggctccatcgccgagcggacccagttcgtggcgtacctcatctactccgccttcctcaccggcttcgtctacccggtggtgtcccactggatctggtccgccgacgggtgggcctcggcttcccggacgtcggggtcgctgctcttcgggtccggcgtcatcgacttcgccgggtcaggggttgtccacatggtgggcggcgtggccggactctggggcgccctcatcgagggcccccgcattgggcggttcgaccacgccggccgctcggtggcgctgcgcggccacagcgcgtcgctcgtcgtgctcggcagcttccttctgtggttcgggtggtacgggtttaaccccggctcgttcctcaccatcctcaaatcctacggcccgcccggtagcatccacgggcagtggtcggcggtgggacgcaccgccgtgaccaccaccctcgccggcagcacggcggcgctcacgacgctcttcgggaagaggctccagacggggcactggaacgtgatcgacgtctgcaacggcctcctcggcggcttcgcggcgatcaccgccggttgctccgtcgtcgacccgtgggccgcgatcatctgcgggttcgtctcggcgtgggtgctcatcggcctcaacgcgctggcggcgaggctcaagttcgacgacccgctcgaggcggcgcagctgcacggcgggtgcggcgcgtggggggtcatcttcacggcgctgttcgcgcgcaaggagtacgtggaccagatcttcggccagcccgggcgcccgtacgggctgttcatgggcggcggcggccggctgctcggggcgcacatagtggtcatcctggtcatcgcggcgtgggtgagcttcaccatggcgccgctgttcctggtgctcaacaagctgggcttgctgcgcatctcggccgaggacgagatggccggcatggaccagacgcgccacggcgggttcgcgtacgcgtaccacgacgacgacgcgagcggcaagccggaccgcagcgtcggcgggttcatgctcaagtcggcgcacggcacgcaggtcgccgccgagatgggaggccatgtctagtggaaccggaggagctgagctagtagtacatacatgcagcatcatcgatcgaacgaaatgcatataagcgtttttcaaggttgatctgatgctgcaggtttcgtgattgtataataggaagaaaaagatagtagtattttttatctgagatcatctgtttggaacaggggatttgactaagatttgatataaatttacacaaaatcttagcaaaaatccctttatctcaactctcaagtagagctttgctttgtacaacaaagtatcatgtgtgatataattgtcaggtggaaaaactggaaacgggtataatctacctttctttgtcaatgatcgggtgaccacatgaggagagagcccgtgtttgctatcaggttgaaaaaaaaaaccatacgtaataataaataaaaggttgacaactgtggtatttgtagtttgtacaccacttatatgatttttttttgtacttcccgaatgcgtgttcagtaatgtataggcgactgctaggagaatgcatataacgtattaacgtttgactttggaccggtacaggagcagagatatgtgccagtttggtgcactctcaaataatggaagcaaagtttttccccctatttaattttataggatttttataggaattgatacatttcgttccaaattatttgaaattcctatgtttcaaagggacccttagaatgaacaaatttatcgaagttgtatgtgattttattaatgaattagatcaatgatcgcgtgaattgagagaaaaattcatgtttccaaaggagatattagtattgatactcctttggttccatattaattaacgttttggacaaggttaaggtcaaacttttataactttaaccatcaataactttaaaaatatttagtttaaaggaactagaacaacatatatagatttgtcttttaaagcactataataaaaataaatatgtatttatttattatatatattataatagaaaaataaggtcaaaaatatatcttgtagaccgtgtcattgttcaaaacgtcaattaaaatgaaaccggagggaggctaggctcatgatattagaatttgaaatgatcgccttgtcgttctgtcttggagtgataaggtcatggaggaactccaggctaggttagttcttaactcgttccacccgtgattttttatggcgcttgaaagctacttgaggtatttagacttaaagacttaaaaaggaaatgccaatcatttgtcacacttaggcaactttcaagtatatgtgaaacgtctccaaattaatagttatatgatgggatcttttaaacctcactggtaagtctcaacctcttggtggtccttgtacttaacattgtgttagtacatgataattttaacttactagttcatgtggacctcatcagtcatcactagtacccttttaggtattacctgctactgatgccctgatcatgctccgattaattaagaatgtaggagacaaaatatattgattcaagcttcaattgttgtagggcataggttgtactcttcctaaaaatgattcttttttcaagagagtataattggatgcatatacttaacacacatgccacattcacaccactgtatataagcgtgcatgacctctacaaaatgcaatgaaaattgtaaatcgtaggtcaccaaataatctcaaagcataactccctaaaagaccttatttctagctatgcacatatacggaaggagtacatgcaagctatctttgtaatgttattggcagtcctccggttcttttattttttaaaaaaattcttcccctaaagagattttagaggcacatactcattctgtctcataaaaaaacttaatcctagattcccacgattagattttttttggacatttgaaggagttttagattctaagcttaggacatgtttatgggagtttaaggtcccatttggtagagcttcaacttctaaatttaactttagaagttgggtctgtagtggagttgtcgagctgcgtaaatccagtttcacctctctagttcatttttacgagagtactctagtcagctccactccctttttgggtagagctgaaatcgtttggttggactccagctataagaaagatggatccctttttgggtagagctgaaatcgtttggttggactccagctataggaaagatggagctggagctagagctctgccaaacaagttctaagattcttagaagaagttggtaagaacctaaaaaggctgtaaaaacttgcttttattttttggattccgtaatttctccaaatttggatgaaaaactaggttgtttgaggaaacttgtgattataagatacagccgccggaagctcttctaagcataccctagcactgacatgcatgccaagggcgcccttctttggaacatcagaaggagtaaatcttccaaaaacatggcatattcggccaatcttcgatccactgtcaaacatggcatattcggccaatcttcgatccactgtcatcgctcgtcgagagaacttttacggtacaatatactaccagtatatactgacagtatatagaagggcatattaggaatttgatagaaaataaaataactctttagtaattttctgttcagattgaatctaattgggagtacctggtcctggatgacgaaggacgtaacgatagcatgatttgatgatagaataacaaagaaaagacaaaattaccctttcaaactttatactgcaatctaattaactaaaaaatcaaatcaatctacaccgttagatcatatatacttatagtatatactagcagtacattgtaccataaaagttctcgccctaaaaattgtctgagacattactgcacttatcagttatcgctggctagtggctacaggatcaaagccattgccagtcgcttatattttatttagtctcacaagtcactttcaactcactaaattcggaggactacagccattgccattcttttggatagtcatacggatcgcaatttacatggtcaggcatggcaccgggaaactgacactggcactgcactggaatttattctcagatttccttcctttcatcgttggtccatttcaattgtactctgtatggttattctataatctgcgccatcctttacgacccccctttccactgtctggatgactggatctctagaatcgcagcatggcaacgtatggcgctcatttctccatgttttctgccatgtgacacatcacatgagcagatgaactgtaagcatctcgtcagtcgcaattccctccgtacccagaatcttctttcaaagaatcacctttttgcaccttgcagagacaggataaaaagatgatagattgagaacccaccaatttagaacgaattacataataagtttaaacaagaagaagctttgaattggagggaggaaatggtggacatgagagcaaatcaagagaaaccgagataagatatggaagataaaatgataaaatgtgtattggtcttactgcaaagcagataaggagcagaacatattctttgaaccatgctcctacaatcatacatgataatgagaggccaatatgcaactgattgcagctttccgtatatccctcgtctcaagtctcaaccagctattccagctgttaatgtaatgcttttcgttagtccaggctcaaaagtccaaagtacttgataatgaaagcattttgcaagggttctccacaaattgaattaatataaaattacctgcataacagataaaaatggtagtttatagaaaactctttatcatctgttcttcactccatctttagcttatgtctcctttactttggtgctcctgtacaagagggggaaaaagaacaagaatatgccctgttgacatttgacaacaaattatcagcgagcgtagattttgtgaagactggaccataaaacaaaggttggtcatggtataccgacatagaggtgttatccatacctataatggttgagcagcagcaggtattacatgccagataggacagtttgttacttccgaaccaagggaaacacagtggcagcactgaagacagaattaagaaaaaagatcaccaggtgtgggatacaaaatgggagtaagcagaagcatattcggccatccataatatacacataccttcatgatatgcaaagataacagcattacaatggataaatcctgtagaagtacaccccagtagtggcatataagcagtacctcagccataaatagctcagggtaagtgtttaagggaacacgaccatctatctaccagcataatgctgcctaggtcaacagtttcagtcatgtacagaattagaagatgctgatttttgaatatgaattattaatctatgcaaatgtagcctgcatttccattgtggtagctaacttatcaagagtgtcatagatatcctctgactcagggtgaccatcatcaccagaataaaaccggcgagttttgcgatcaacctcaatccagctacaaccaggcagcttcttgcctgtaacatcctccttcatgagcttccttactttcctaacctcttcccagaagccaccttcactgtataagtttgcaagcatcactacataattagcattacttggattcaaatccaacaagtttcttatagcatgctcggccagttctaggtgtctgtgtattctacaggcattgagtaatgacccccaaatgacttcgtctggttgaactttcatatcattgataaaattcatcgcatcctgaaaccgtcctgctcgacaaagaagatctacaacacaaccataatgctcaatctctggctcaattccatgctcatcacacatcagttcaaagtatctaagaccttcatcaacaaaccctccatgggtgcatgcattcaacagcccaacaaaagtaacctcatcaggttgaaccccttcattcctcatcgaattaaacaccgcaatggcactctcgctgcacccatgtagtgcaaggcaattgatcagagaattccatgtggtcagacccctatcagaaaacgcatcaaagatccattttgcctccatcaaattcccacatttaccatacatatcaatcaacccattcacaacggatgagccaaaaccaacacagctcctccacgcataaccatggatcacctttccaatcttcagcatccctaaatgtccgcacgcagacagcaaacaagatactgtggtgccatttggccggaacccctcatcaaccatcctcctgaaaatccccactgcctccacaaacaacccattctgtgtgcatccggcaatgatcgcattccaggcaggcacatccctctgaggcatccgttcgaacaacactatcgcatccccaaccttccctgcccttgcatacccggacaccagcgcggtccaggagaccacgttcctatcagtcaaaccatcgaacagcttccgcgcgtcgcccatcatcccgtacctcgagtacccatcgaggagcgaggtccttataaaatcgtgcccgtagaacccgtccttgcaggcgtggcaatggatcgacctgaccagctggaccccaatggcgcaggcggcgcggaggacgagcgggtagacgaactggttgggcgcgggtcggccgcggcggagcatgcggaggaagagcgcgagggagtcccgggcgtgttcctgcgagtgggaggaggcggcggcgtaggcggagagcatggcggagtagaggaagacgttggggctgggcgtggcgtcgaagaggcggcgggcgtaggggaggcaggagaggcggagggaggcgaaccggaggaggtggaaggtggtggtctgcgcggcggcgcggccggtgacgacggcgtgagcatggagctgcttgaggtgcgcgagggtggcgcagcggtggagggcggcgacgaagtcgccgtgggaggagaacggtggcgccgggggcatcgtgcggcggcgccgtgcggaggtttggacgtttggtttgcctctctgggctcgtcgcacactcgcaccgcgtccgtgggcttaagctttggatgggtttttgtttttttgttatgttgttgttctaagaaagcgtcattttttttcttgtgacatgtgctctattacaaatctcaagcaaacacaaagaaaaattgtaccgcgatttgtgataaaaccggagaatgcccagcatcggtctaccggggaggtgggaaaatcgatcgctcgccctcccccacgtgagcacctgtttggcccacccacttatccatcatctttattccacaaaagatgtttcacctagtgtacttacaatgttttactatgacatagatctaatgttgcagtgaacgaaaccttccattgcaaaaaaacccccacatattttggaaactccttattaagggaatttggtttattttttttgttccactgaaaaatgtttcacctagtgtaccacaatgtttcactatgtatagatctaatgttgcaatgaactgaaacattctttcgctatttgctgaaacattgtttttatataaggtgaaacaacatctaatttaaacgagtgaaacattttcgatctacttagtgaaacaattccaatatacctaatggaatatcgtgcaacctttaaaaataattcaataataagctaatttttttttggaatatatctaggagtggccttgtttcgaagatttaattacaacgaatttaatggtgcaaccggatcatgatttggataagtaatttaagagaaaaatcagtttaaagtagttttgcacgtaaatcgaacgctgccgtcagcgcccgattttaacctcctcccatcgggcgcctgagcgggagtcaaacctgaggtttttttgttttaagaaagcgtcaatttttattgtgatgtgtgctctatcacaaatctcgagcaaagaagaataagattgtatcgtgatttatgatagaacctagggtgtggctaattggtgcgtaactgcgtacgcaccattttttggaaatattgcacggggtgaaagaaagtggtggacccacttttgttatgcgtttctcgctaacctcccgcgtgtgtctcttggttttttactttttatttttttttctaaaaaaattccccgcacacgtcttttttctattatcctttcttttttttactgaatcaaattttgaaattttgaaatcatttcaacttagatttgaaaactattaagttcatatttaaaagtttaaacttatattagaaaactttcaatttagatttaaaaattttcaagtgaagatttataaacttccaacttatatttaaaaccttttcaactcagaattgaaaattttcagcttggatttgaagatttttaaattcagatttaaaattttcaacttggattcgaaaactttcaactgaagatttgaaatcttttaacttaaaattcaaaacttttaactcaaatttgaaaaccttcaaccaacttaataaaattttcaacttaaatttaaaactttacaatcaaattactgtagtaagtaaacatgaagccacttttttcaacaaaggcttaaaacaacaataaattttattatttgtatgtttttataggggaaattaaaataaagtcagtaataaaaataggtgaaaaaacataaaaattctagcacgatcgcacgggagaaacgcaatcacatgagtctggggtccacatgtgggcacgtggccgactgaattgtttcactgcgtagagcgtgacgtgggccttggtgggccagccatgtgcgcgacttgatttgctcgtgcatacaagagagagagagatgaatctcgtaaaacatgagccacaaagtcacatcgtgagaaacaaaaacaattttctacatatgtaatcatccaatacaacaatattttcttagggaatttcaaaccacttgtcataaatgtgaattttcataatggaggtactacagctcgtttaactcttttaaggtatttttatatgtgactttgacaataattttctattgaaaagttaaatttataagatccactaagcttacaaaatcaaaataaatatacccatctttttttttatgttttggagctaagtattttttagataagttaatagtgaacgttttaagagttttaataggggttaaacatcattgttttaatcaaagagagtagtatagttagcttgcaaggaaaagaatgtttgatagggcacgaaccatcatatctgtgttggtgaaggactacaagcagacctatattggtgatggattataagcagacctaggttggataactattcaattatccaaagcgcaaaacttttgtgcaaaacgttaactgaagtattacgtactacagcatacacctccaactccggacgtccagaaaaaatccacagctattacgacaccgattcgtaagggcggaaacatgtcacacgacaacacgaacgcggacgcggctacaccggtggacgaacgccgggagaaactgacgagccctccgcgcgcaacgcgtcctcacgatcctttgcttcgatggtctccttcaggtcgcgagcaaactcattgaatcccagtgcattcaggacgatctcgtctacggccgcgtccactgtcgccgccgccgccgccacggccacctcgtcctcgtccacttcgcccacggtcaccgccgccgcggtcaactcgtcctgcgtaaaagccaggtcgacaccgttgtcgtcgcacggggccgggacgtgatcagcgccggcgacgacgggcgccgacacatgagccgccgtcgtcgccgcgtgcgggcagaagcaggagcagatcatgtacaagtgctccacgacgctgccaccgcatcgctcccggtcgcggccggtgtaggcgcgggcggcacaggcgaggagctcctccggcgaggaagaggcggcgatgctcgggcagtgcagcacgtcgtcgtcgtcggagcggagcagctcgcccgccatgtcctcgcccaggtagcggaagacgccggcgaggaactgcaccgggttcacctcgtggacggcggcgacgaacccatccgcgtcgcgagggaggcccgtgcactcgtagaagccgccgacgtggttctcctccccggcctccgagttgtacatgtttggttcctcctcctcctcctccggctccatagtgattagtgagcgaggcctttcacgagcgtgtcagttgggtaacacgaggaagagccgaagaggtcgggcgcacgtgcatcgaagtatataagcacggaggatagtatgtaggcgttacgatgagtggagtcactctcggactcggtcacgtacgtagcaccgcgcggcgccgtctccgatccggtctcttatttttgggttaatcagttgctttcgtgggacagtagtagtgttttcatctgttgagatttatatatcacctcttttttcatgtaatctaaatagtaattaaaatattttttaaaaaaactggtaagatagattagtaaaagatacatgcttcatccgtttcacaatgtaagtagatatctagattcattaacatcaatataaatataggaaatgctagaatgacttacattgtgaaacagagtgagtatatcactatgcaaacatgtaagttaaaattaatttaggccttgtttagataaaaaaaatcttggctaaaaacgtcacatcaaatatttaacacatgtatggggcattaaatgtgggaaaaaaatcaattgcacagtttggatgtaaattgcgagatgaatctttttagcctaattacgcaatgatttgacaatgtgatgctacaataaacatttgctaatgacggattaattaggcttaataaattcgtctcccagtttacatgcggaatcagtaatttgttttgttattagtatacgtttaatacttcaaatgtgtgtccgtatacttaaaaaactttacacccaaagaactaaacacacccttaacttttacaagttataacaaatatacacacgttaattaactagtttcaattttccccgcaaaaaaaactagtttcaatttaatttgtttttgtcctaaaaaattaatttgtttttattataacttatcgaagtcaaatttaaacttgaacttgttttatttaagtggcatgcaagaaatgagagataatatcctctcaagaaacgaaaaaccatctccacttttgtagcatctaacttgcaacaattctatcagtgtcgtctctagtcgtcctctttttttttaaaaaaaaaaagagaaaaaaacgtagcttcgatcgtcggatgcttgatccaagaaagaaaaaaaaagatatggttaaactgttttaattgataaaagaccaaacatcaaacaaacaaaaatatcgaaacattctttataaaacgagaaacaaataaagtataaaaactgcagtatcatcactggtggaggaaccatctttggtcggtccaccagatttcacaatagtcccggttatattaaaaaccgggaataaaaacatctttagtcccagtttgaaagctctgatgaattttttgatctttagtccaagatctatttacaatcccggttggtgttaccaactgggaaaaaagatcaatataagctttactcccggttgatgttaccaaccgggactaaagatctcaccaaccgggaaaaaagtcgacataagcggggtggctgcacgcgggttggaccaatacaatctcctcctctccttttttaactcatctcctcacagagtcacccttatctctttctctccctcctcccttcctctcctcctctccctcctccccacctccctctgcaatggcggggcgcataggcccggtcggccagcgtggcggcgtggcgcgcggagggccgggctaggcggcgcgctggcggctggcggcctcgcggcggcggccggggacgcggcgggcagcgcgcggcggctgccggccggtgcggcggcgcggcacacagagggccgggcgaggcggcacggcggcgcgctggcacgctggcggctggcggcagatccggggacgcggcgggcggtgcggcggcggccggcgaggcggcgcgccgccgcggctgcaggccgttcatcttcttcctttatttctttctttttttaaatatgtgattcggatctgagacgatttgtgtgtgatgtgaatatgtgatgtatttgatttgtgtgtgatgtgaatatgtgatgtatttgatttgtgtgtgatgtgaatatgtgatgtatttgtaatgaattttgtagaagttgtgatgtaattttttaaagattttgttatgtatttagagattgatttgagaatttggagactattcggggttgattgatttgggattttgggatgggatataatgaatctatatatgaaaaacaatgaagaaaagaatagaataaagttgcaacctgagctagcctctttagtcccggtaaagatactctatatttagtcccggttggtaactccaaccgggacttaaaaatagatttttacttccgattttttcacccgggactaaagatagcgatctttagtcccggattcgtagtcccggttagaaaatcaggactacaggggggttacgaaccgggagtaaagcccatttctctaccagtgcatactaaaacatttacataacatcggtgcaaaatttgtaaaatgaaataataaaacatcataaaaatacttattgaacatcaaagaccattatgtgcaacatttaaaaatctataatacatacatatgctagacactgctcccctgtccacatgtcgcgtttggatacaggtcatttgcagtactgcttgtgcagtactgctcactgacatgtgggcctcacaacctatcggtgtcaccttacgggggatctcaattagtcgcgtttacatctcaactactcggcttgttttgtgcttacattaatctagagttctcccatgtgctcatctcataagttttgccaataaaacctatacaaaaaccacatcgatcttcatagtccatctccctagcaactagagccaatctatggaattacaggttgattaacgatcattatagcgtgcgtttgttttaactcaagtacaaaaggtaactaattaaatattagtcccatatttgaaggagagatttaaattgattttgtagtcttttatgttgttgtgttctcctctccttccccttatatgaagatgttgagaagtgcaatagtagcatggatcagcaattacaacgaatgatacagtgctttcatgataagaccaagtgaagcaaacacccacccctatttgcacaacgatactgttaatttttttcgcacaagctccgcgtcaaagaacttagggcttattcggttcataggatttttaaatcaaaagaatatgaaaagtaaaagattaattaggattcacatccactccattccttaggattttttttcaagaggtcttacctcatgctaaaaatcctatggaattagcttgtaagactacaatccttaggaatttggtaggctacatttataagaaacgaatgatgcatatagaaaaaaaatcctaaggatttaatttctacaataatcctataaaaatcctctaaaccgaatgaagcctaatataggactaaggcaataaccatgaatcgtgtagaagcaacattgttatgcatttgtgctacgtcagtgaatgggcatggcctggctgctcttgccgctatgtgttatttatgggggctacatcattgttgcttgcaaaagatcaaagtgaggctaggcacactaaaattgaaccattgatgtatatagatggaaacatagatatggaaagagagaaggtgtatcaattactagaaatggattgatgctcgttaattagaagtcgagaaaatatgaagcacaaacttgaactatgtacacggagatcactattgtaacacatggacatgggataagagaaattgtgttggttgctggatagagatcaatatttgttaattagaaattgaggaaagagaaaataagatgcgaggactagtacaacaaaacttaaacatagacgcacatgaaagcatatatggaaacatggatatggaaatagggaagtcacaaacatgtagtattaattaaatcaaggaaagaggaagcaaagttgtgaggccaaacacaacattactaaaccgttgctacatacaggagaacaaatggaaagatgatagaaaacaggaaagccgcgttgccggacaaatatcaatactccttaattatatctcaaggaaagaaaaagtaagttgtaggataagcacagtaaaactataccattgatgtacacgggaacacccataaaacatatatatgaaaagaaacaagaaagccattgatagagattaattagaagtcgaggaaaaaggaaatacgtcgtatgtctagatacaataaatatgcgtttggttcatggtcatggttagataggatattctcattcagccattttggccggatattctcattcaaaattcttgtagaatatcctctctctgactgtcccatacatacttatccactaactaaacacgctcaacaattagatgactatctcgatatcatttcaaccatgaacggagattaatcttcattaattaaatggtaagaaaataggaaagtaagacatattgacagacacaccgttgatatacatggtaacacgaatgtaaatatgaaacaagaagctgcgtacaacccaaagtatcgggtttgtttcagccggtggcagtgcgcacaaacagacatggacaagttcatttaaactacattgttgatgtacatgggaatatagataaaacatactttttcttacaaccactactagaaaaagcatttttcctgacgtggggtctttttttcgtaggtagacatgaaccttggagtcaaataactgcctaaaaaaaataaatcagggtgaagttcgctgtattttcacagacggaccacttaagcggcgtctgcgaaaatctattttcgcagacgcaccttatgtggtccgcctgtaaaaatcgtacattcaaaaaaaaatgatacttatctactcctccaacccctccccaccactcatttccccaaacttatcttctcaactctctctctccctccaccggcttctcccctcccctcccctccctccctccaccggcggcacggacgcggcggcggtagagcgcgcagcggcggagtgcgcggacgcggtggtggcgtggacggcgacatcggtggctcccggtgcggcggcagtagctcccctcccctcccctcccagatccggccggagggaggccgggggagggcagcggcggcgtggacggcgacgtgggtggctcccctcccctcccttcccctccccgatccggacggagggaggctgggggagggtggcggcggcgaggcgcgcgcgtggtcggcgacgtcgatgatggctcccggtgcggcagcggcggcgaggcgcgcgtgtggtcggtggctcccgttgcagcggcggcggctcccatcccctcccctccagatccagccggaggaggccgggggagggcggtggcggcgaggcatgcgcatggacggcgacgaggtgattttttttgtttttttattggattttcgcaggcgggccattgccccaactgcgaaaatagatgattttcacagtcattggtctgcaggcgatcctcctctccgtctgaaaaaattgcttttggccatatgcaaaaatgctttttctagtagtgaacgttgtatctatggaaggaataagaatacagtgaatggagattaatcacaagttaaggaagttgtagggctggatacaataaagtgcacgtttggttcatgttcaaggttaaatatgatactctcactcggtcaatttggctggatatgtttatccagtatctacgtggaatattttctctttcgatcgtctcatccacccatgccaacaaacaaaaacacttaggctgtgttcttactcaggtttcctaacttatctctctcgttttccacgcacacgtttttcaaaccgttaaacggtgtattttttttaaaaaaagtttctatacgaaagttgcttaaaaaatcatattgatctatttttgaaaaaaaattagctaatacttaattaatcacatactaatggaccgttctgttttctgtgcgcacgttagagcgaacacagccttatagggattaaaatggtcatctcctattcaggatatcctcccaaccacgaacgaagatcaatcgtcattaattataaggtgagaaaaaaagaaagtaagttatattgacagacacacccggttgatgtacgtaatactaacacattaacacggatgcaaaatggaatgtatgaagctgtcaccaacccgaagcaccgggtttgtttcagccgatggcagtggatccacacacacacatacaggttacagggagaccgaccgaggtccgagggtacaagaagcgcgtaccgcccaaacatcgcagcagcaggtggcgcctctaattcctcctcctcgcgccctagtcccctcgccttcccctcccgtctcctcgcccgccggccgccgcctgcgacgatccccatcccgcgagcggcagcggtgccggcggtcctctgccgcaccctcgccgcggtgagctcccgtacgcgcacatcctcatcctcctcatccctctctatacgcacctctttctctgaagcaaattggggttttggccgggtgggacatgcaccatgcaccacgttaggtccgcccctgttgtgatgcggggtgagggctcctcgtatgagggtttttcttcggcctatttctgcgaagtttcgatgtcctcccgcgttgcttgggtgtgcgaatgtgatcgctccgaggttgaggagctttgctcgtattgtattttgggtgcctgttcagtcgctttgagttgctcgtttgttgctctgatcacaataaggctgcttctcctgcttagttttcttgtgtgaaaatttgtgagatctgggcgtgcctttggcactattgcccccaaatccaccattgtgccgacttgtgagcttcctgttcgggagttggaggcgttctatgtgaagaattagatgcatgcaacattgagtacttgttcaaaaggtcataatatatcagaatgcagccttgggtatttgttcaaaaggctagattctatatacttcctccgtcagaaaatatagctacttctccacttactccctcatctcaaccatccctcatttaatttctgcatctactttcccatctcaaccaatcacaaccatccctaatgtaatttaacccctcttcttaatgtccgggaaaaactccaaaagtgttttttttttggaatacacgaggagcgtatctttgtattaagaaggaataaatgtatgtataaagcgggccaaaaagacaaaacgaaggggacagggtacaggaggagaacaaaaaactaaaagcctaatctccaactaaatttttgcgacccttctccactaacatgggctaccaaaacagggattgcagctcttgctagccgccacagctccgcttcacccgtcataacccttgcaacctccacccaagttctgctcttctggttgaagactcgattgtttctttccttccagatcgtccatgcaaccaatgttgcgatggtgtcgaaaccccggcgatgttccttgaccatcttcttatgacagtcacacaaccatgaaaagaaagagtgttaatgagcggtaagcactccgaatgcccgatagctttgaatgcaacccaccatagttgccgcgattccgggcattcgaccaagagatgatcaatcgtctcttcgcattgatcacaaagaacacatcgatccgggtgtgacaaaccacgactcgggaggcggtccgctatccagcaacggttaagggtgaccaaccaaaggaagtagcgacagcgagggggcgcctgtttatattttttttgacagagggagtattatataagttagtgaaggttaaatggagccaacatatttgctctcaaggcctagaaattaccatgttaatgaggtaaaaaaagagaaagatatatgccactagtcatggttggtctagattatagctatgtagattgaaaatagaagaaagaatatatatatatatatatatatataataaattatatattcaaataagctttaatggagttgcgcatagtttgggtgggaaatttgaccagatatcaaatgttttattaaagaaaatgattgcatgggaaatattgaaatatatttccataggtttgtagctacgattttcccactttttttttgctgaagcctttttaagcaactgtttggattaactcagtcaaatgcagcaggatataatatagctagggcagaaatggcattcttatgtttcagaaccacaatagacttggtgatgtgagtgatctagataggactgcgacttccttccatgacaattgcaatgggatatttgtagtatcaaatgggtggattcacccatgtaaagttttagactggatttcaaaaccaatattcaataccgatcggatagtactgcaatttcctgcgtttgttagtcacaaagttcccgggtcgacgggattgaggaacggggtcgagaaacgtggtatgctacttgtgagaggtttttacaaggtgggcacgaaaatgaccccgcgttcccttaacggggatggcgttcccgggtctaggattcgctgccactgaccccgtttccagtgactaatatgatctgaaattgattttactttgtttgtattcaatatgttaattaagaagggaatttatatcttttttgaggaaatcctatcctctacaaaccagatttatatgtttttgaacttgttcgtccattgtgaacaaggtaaaccacttgcccatattattagtcttatcaactcgacactatggcttacattataactatatttagtaaatgatcattatacacctatttatggactactgcaattcaaaaagagattattactactgtagcttgaacagttctctgaacagaaagtactgttcaaataacctaaaagtgccaatttctgacacagttttatagcatgatttccttatgatgtttgtttttgctactgcattctgatggcagagaaacatgaacaattgagctaaaggttatatgtattctgcttctgttcacggacactattgtatttgcagggtcagcagtttccacatctcagctaaggactggaatggccaaacccaatggcaaagagaaaacgggtgacacgggattgtcgtaagagttattcttttactcagcattttttaatacaattgtttttatgggcatccgatgatattatccgattccaaactctatctcactcagcaaaaaaaaaataattcacgaatatatgacatgtcttgcacactcagaattcttatactaaaccatagacacatcttacagaacattactgcctcatgtaacactgaacaaggtatacatttctgaatgctgctcaagttgtctaactttgcatgcacatggagagataataatgcagattggatgtcagctgctcaagtagtatgaattactcattttctgtttttcctgttgttgcactgctgtgtcatgaaaactagtcacttcccctggcatatataaccattctggttatagtgctatttgttaagtttattcctcaaaatatttaattttttcctataatcaagtagatggtatgtggcaattatccggtgagtaatctatttcaaatgctgactgaaagaataatattaacatgcacaatagattgaaaattcagcaataagcacagcccttctccaaggataaataagttagcttgtacctggagtactcttgtggttggtcctgtagcctagtgtgcttagtccacaacttctcgtaatgtatcacaatcttaacttcattgtacattcgtaagatgtttgtgataccatgcttagtatgtgtatatggtttttcttatcacttgctttctcaaaggatatcacgtgttaatgtgccatgctgatttgttccactgcaagcaggatggctcctccaaagatttccaaggatagatttgatgctgctatcagagccatggctgatattggtatcctaaaggaaactgctgcgcccgtgttgaataatctactaaacttattcgattacaactgggtgcatatagaagctgataattatctggctcttgctgatgctatattttgtgattcagatcccaaagtataatctttttgctttgttctggcatattattaaatatttggttctttaagtcagtagtgtagttttattctttattatgtgagcaccatatatcttattatttcattaatctgccattttgatttgattcaagttttggtgatgtaccaggaaggacagaaaaggcaagctaatgagacaaatcttgatgcagaccaatctaacaagaagcttaagacaaaaaagcgttctcaaaatcctacatccaagatgcatggcaatgacaatagagagtttgttgaagctccaccacagcagggacgaggcacactgtctgcccgaactgttaatgggaagaaagtcaccagggcccacttggagttgccttcttcacaattactgatcaaggaaccacatacatgccctagcattgcaaagaatacaacaattgttgaaaataattctgctgtattatgccatggtcaagaccttcaaacttttgaggtcccagtagcaactacttgtccgcaagttgtagcccccagtactcgcaaaggtaatatctttgtaggcgacatagtgttaataatttatatgaaaatgctaaccttttaatgctttgttgatggattcccacaaattaatctagttttattgtataaactaaaacatacaggtcgcccagcctattaatgttgtctacctgagtgtgctaatctaaatattcttctctccactctatccgttccaaaacatcttttgggcgtggtgcggtaacaacattttgaaatttgacaaatgtatctaaatcagctgcataaaagcaatattagtgtgtccatcatcaatttactttcataatgctgttaattcatagaccatccaaaattaatgactacttattgttgggaattcatggagtaagtttaattgttgggttgtattgttgtcaacttcagtgctattttatcaatttgttaacattatgttaatatagtcttggtctgttaatcagcttcctacctacacatcactgtagcgttttttttttaaaaaaaagatgaattacttatggtttagagttgaaaggaatactttatataaattccagttaatggggtgttgaggctttgagagcaagcgtgtattgtaaagcattttgctagacatgagtgcattattatttaaagagaattttttactactactttcacaataagaatcatgatcctcaaacttggatttgaaaaagacccgttatttaagtaatatttctgtgggattttgtggtcactccttttgaactagggttgtcaatatatccaaaagtaaaactaatattgatattcagatggcctccttcggccttcccggcgaaaaaaactaatattgatataatgttgttgccaatatattgcgatcagagaagttgtgaaaatcttgcattgtgactattaacttaaagaccatttatatttggccagagattatttcgaattgtgttgtcaattttggtcaaagagtggacgtatacctctataatggtatatatatagagagagagtaagttcacatagttatctgaaattgttgcttagaagtgtgatttttatagttttgtgaaaggtagtgttgtttttgtggaatttattcacatatcgtatacactttttgcaaaaagaaaaaaaaacatgtggctgttttttggatatatagaattttatgtgtggatgtctgagggattatgatcttatgtctgttattttgggggatggggcagggaggtctagagctctggatgttgatatctcctggcaaagaattggtctagaatttgatctctaataactgtacaaatgtcagtcctttaaatccctgttctactctgttgcgagcatgcttgtctagtgatactgaacaatattggagtattctagagatgtcctttgcttcctgcagaaagtgtcattgttgttgctgtcatgtttatattctttttttggcttgttgctagctctttacttcatttctaatcaagtcttttggattttctatttttcacgttatgaagatgcacgtaggacttctggtgctcgccatgatcagaagcatgaaggtgtatctggtgcgcatgaaaggaacagggctgttgcgtgtagcaaccaggaaattgtaagcagcaaggattctccatccaacattgaggtagttttgtcaaattatggagctgggaaactatcattcacatacaactcttccctggcaaaccgttctgattttcatctgcctgacattaaattaatttgcaagaaaatggaggctagatgccttaggaaatacaagagcctagaacccaatttctcttttaagaatcttattaaagatacttgccagtgtattgttgaatctagtggacctagacatgaaggcatcatacaaactgttcctgccctggacattctgtccaaaccttcagtgccgcaaatattgcagtcaaatcaagctaattccgcttttatgccacctaataatgtcatgagccttggtggtacttcttcctcttgcactgttgctggagttagccagaattctagtaatatgccggttgttccgcatcaactacatattggtgccaacagaccacctcatgatgtcaatgatatcacaaaaggtgaagaacgtttaaggattccaattattaatgaatatggcaatgggattcttcctcctccatttcactacataccacacaatatcacactccaagaagcctatgtaaacatctcccttgctagaatcggagatgacaattgctgttctgattgtttcagagattgtctggcacaatcacttccttgtgcgtgtgctgcagaaacaggaggagagtttgcttatacaacagatggccttcttaagggagcatttctagatagctgtatctcaatgattcgagaaccacttaaacatccccatttctactgcaagatttgcccaaacgaacgaatgaagatagaagtaaattctgattcatcaaacacagaaatgaatcctggtccttgtaaaggacaccttacaaggaaattcatcaaggagtgctggagaaaatgcggctgcactagaaattgtggaaaccgtgtggtgcagcgaggcatcacacgccatttacaggtaagtaataatatcaaagtttttgctagcttgacgataatttgtcaactgccaaatattgttgaaattatgatgttagctgcagcagtttgttgtgatagtgcatcatgtgtatgatcatgtgcttgtcacagtaaacatctcattgcttacgtgttttaataatttttcttgttctttctaaaatttcaggtgttcttaacccctgaaaaaaaaggatggggattgcgcagtactgagaaacttcctcgaggtgcttttgtttgtgagtatgttggtgaaatattaacgaacattgagttgtatgaccgtacaattcaaaagactggtaaagcaaagcacacatacccattgttacttgatgccgactggggtactgaaggtgttcttaaggatgaggaagccctttgtctagatgccacgttttatggtaacgtcgcaagatttataaaccacaggtatccatttattatttataataatggattctttttttaccagaacgtctaatgattgttatggagtcctctgtaatacatgaagctgttgcttctatgggatgggtaaaaaaagggatgagctggttcttgtcgctttctggttttcccagtgagaacctggtgatgtacattttctgactgttctgcgatttagtgagttctccatgatatgtgtgcttcaagttgaaagtgtaggaaatttcattgaaaattgacaattggtgtgactggtaaatggctaccagtggggtcccaactaaaacctcatggaccatagcgtttaaccctggttctgtgaactaacttaatatgtgcttttcagttgtcattatatgatatttctcgttacaaaactgtgaacaacatcgtagatttgtgattgtttggctgcacctatattattgcctgatgtcgtagattagtgattgtttggctgcaacctatattattgcctgatgtcagcacttaatcaagatagttaagtcaatgttactcttatttgaagctagctaacagaacaaagtcttatccaaattttgaatatataagtatttcttaaaaaaatgttgcttctgtgctctgctgaatctaacacttcttccttcttgacctggcatatcattgtacggttttcaggtgctttgatgctaatattataggaatacctgttgagatcgagacgcccgaccaccattattaccatgtattttttcaactttagcttgtaactgatatatattagtccaagttaaaccatattgagcttattctgtgtcttccattttttggttagctggcgttcttcacaacaaggataatagagccttttgaggaactcacatgggtaggttgtactccacaatttaaatttaagctccatttcatgtggactataaccattttcagacattctagttgaatttgctttcatcttatgttttgggctttttgaccttttggtggccaccttgtgacttgatactcattagtgcttttcccatagatagtatcccccctttgtttggttgaatcatgtagcatatggagcactacctgttgtaagtcatttttcgaagtttgccatgatcttgtgtttacctgcaggactatgggattgattttgatgatgtcgaccatcctgtgaaggcattcaaatgtcattgcggaagtgagttttgccgagacaaaacgcgcagtaagttcctgatggcatctatatgtgcatttaggaagttgaggttctcccctaaaatatggctttattaatgctgattctgtgaggcatttaccttgtgtctccatatgtatagatgagtggttctatgctgctgcactcgtctggttcatcaatgaaattgcattagctgacaaaagtttatatactgccacaggatctaaatcgagggcgcgggtttaacctatgaattctctactctgctattcaagtgattcaaggaagtcaatgcagagccattgatggtatcgtccagaaagatgatatagtaatttttctctggaataggataaacaatccagattccagagttacagactgctggttcagcacttaaatattccaacagctcatacgaactgctgtcctttttttccaagcttggttgcccgcaaagcagtatgcttggttgcccgttctttgttccttttaccaataccaagtgatgtaaagaattctggaatgtgaactctctgccatgatatagctctagctcaatgcattatattggggaatcatttgtatgtggagcatttctgctttcttccagcactatttcccttcattttcggcatgcaagaaagaagagtacactgtccactcttccatgacacaaacatgaaacatatgcctagtagtctgatactctgatatagagtacactctgaatcaatacatgcagttgatagtcggatactctgcgtgtttacttcgtggagagcatagtcatcggaagaatacactgtgcaactcttccatgacacaaacatatgcctagtactctggtactcaaatagagagtacactctgatactctgcgtgtttactttttggagatcatagtcatcggatcggttaaaaaaaaaggtaagagaagaacaaaacgtgcaccagcctggaatcgaacccgggtctgtaccgtggcagggtactattctaccactagaccactggtgctgtgtgcttgaagggtcgatggtttcctttttgaacgaagcatttcaaaccaaacgatagtggagaggaaatcgaggagattgggaatatacgcaaaacgaggtgagccattagcaaatgattaattgactattaactattttaaattttaaaaatagattaatatgatttttaaagcaacttttctataaattttttttgcaaaagaaaacacaccgtatagttcgggaaatgtgcgtgcggaaaacgaaacaaactcactcacaatcacccagatcacccaggaaagaacacagccttagaagtgtgaagccagtgatgcatctgattttgctgtgttgccactagtttcaaagattttgtgcagagcgtcatgggcgaattttacagtgtcgaatcaaactttaagggaaggctaaaacgatagtagcagcgagccagcgagtaagcttagctttacctggtcttgtttgtctcgtctcaagagcactgaccgtgcgatcagtcaggttttactttgcgaagtctaaacaagaaaacattgcctattattttaattattcccccacaagattcaaataagagataaacgtaatgttacagaactgacatagactatagattataaaatactgagctattggaattaagttcgtttgcactgtgcctcctcatgacttatcagtacccaagctcagtattacaaacatagtaagataataagtgaataatccatctggttcccaagctagataatgaatggattatgccgttgctggaaatcatagcatcatctactagcatggaatacaccatccatgcttccagaggtgtcaagctttagtgagaggaaggaatccatgccgaatggcagctgaccatgatttctcaatatccatcatctcatccccacactcgtgcatgttccatccttccagagcatgaagtattccagcaatgtgccaagcactcatcacccttcttggaagccaattctgaccacaaaggtagtagcactattaagaagaggttctttgatgtcgtatattttcagattaacaaagcagataacatatctgtattacctcgcaggagtggatattcttcatttcctccgggatcctcattgctggggtgctcatgtaagtgcagtccttgcgaagtttcttaagggggaactgtgatatgggaataaaaattgttccttttggcgccatcttttgctcgttgtcgtcaatattgtgtactatccaaagctgcaataacatgaagtattagcatgaatataagctgcattttaacattacttgtagaagagtctataagctacattttaacattactagtagaagagtctacaggtgcatcatgttgcttgagagtttgtcaccatttcttgcaacaatttttttacctgaggtacgttgtcgctcgagagtttcaaatagcttgccctgttctctggtatttgtgacttgagcatgtggtatacctccttttcattcatgatcacctgatccagattaatgtaatgcaatttaaggcaaaaattatgagaaaaattaaccaaaatatattcaagacaacgatgatttgcaaattgatatatagattatacctggacacctctgtcacatagtgcaatggcaatggcacgagctatcttagaagtgcctgtacgaagaaaaactttctttgcatctgaaggaatactttttagcaccactgcagtagctaagccacttccgtcgataattcgaactcctaattttggatacttctgtctaaatagttcaccgtttccattgagctgctttgcctgaagaggaaacaggggaaaaaaatgctcagttctcatgatgattcaggattatacacactctaaaatgcaatttgagaattcctaaaaatagcacaaacttaaatttttgcactcctgctgtcctttttcaactaatcacatttttaacatgaaacagaggacatgtccatgagattttcttgttattgtttatttttggcacgttttatcatgctactttcaacctttaccatgccattaaactattaatttgattctcattacacgagctttaaaggtaagaactccacacctgattcagtagtcctagactaatcactttaacccctttcatatcagcatccaatattgccttttcaattaagtcgttgattggttctctctcccacgtaaggccatactgcagagtgcaaaaccagaacagttagtatcttccataatccatacctttgaatttagaaatgcataagcgaggggaagtgattacttggaagttgtatcttggtaatgcccatgtttgcatcttcatcttgtttagtttaattctctcaacgacaaatgctgaggacccataaatccatgcaagtaccattgacagccatgccaagggccataacgtccacatgtaccacgcagagtcactgtacggtttggaggctatggatgcaattcctatccttagatgataggctgattgcaagttggtcatatgcgtgagatgaacaaggtcaggtgtttcttccgttcctttcagtgagctttcatacagctcgtcagatgacttgtccatggtgttatatatgtagtcataaaatggcatgaatagcgagtagtttgtgcggaactgcgtatgatgaagagaatggaacctgcagaaggaaatagcatttgtttgttagcattgggtttatgaactcacgaggctgaacttcaagttatgtgaattcagtgatccaatctgtcatcacgttggtaatacatttctatgatagatacatgagagaagagtgttgcacttacgatggggtgtagatcagatacttaaggggtggaaagatttggaaaatccactctggcaccaactcaaaattgcagtgtcccatgttgttcatgaagtcaatgtaagcaatgtaccccacaatgcccatggccgaaacatttcccaaataaattgttgacagtatggggattgcaaacagtatgaaatagaccacatgttcagcaaaaggatgaataacagctgcaatgtataaaatcgttgtaagtgccaatagtaattgtgcattaacagggtaggtacatactcttatatatgtgctttataaaaaaacaacaggacctatgcatgaacatcacactgatgttttatagctaaaacacctcgttcaatttcaggtaatagcctcctcccagatatatgatcttttcttttacttagaaagcaactataatagtcgatcaatccctttcgaattgttctacttgtaggacctgtatttgccaacgtttgataaaaactactccctttgtcctaaagggatttcatttctagtctttcaaccttgcccataaaagacttattttaactttcttacctaccctccgtccgtgaattaagattttgtatcccttcaatacccctaactatcactaacaatactactttcttattaatgaggagcacttcgatcttttacccttattactaatttgttaactttgtttaaaaaaaagtcattgaaggacggaagaagtattctacttaggttgtgtttagttcgtgtgacaaaatttttgaagtatacggacacacatttgaagtattaaacgtagactaataacaaaacaaattacagattccgccttaaactacgagacgaaactattaagcctaattaatccatcattagcaaatgctgactgtagcaccacattgtcaaatcatggcgtaattaggctcaaaagattcgtctcgcgatttacatgtaaactgtgcaattggttttttttcgtccacatttaatgttctatgtatatatacaaacatttgatgtgacgaaaaaattgcaagtttgaaaaaaaaaagtttgaatctaaacacggccttaggccgagtttagttccaaactttttcttcaaacttccaacttttacatcacatcaaaacttttctacacatataaacttccaaattttccgtcacatcgttccaatgtcaatcaaacttctaattttggcgtgaactaaaccaacccttaacctatgtttgttttcagttttccattcagtatcagtaatagcaacagctatatctagatcagaaggttgtggaggtggtccaaactgcattttctgcaagccgcaatatttatgtctcgttttattgggtactctctgtactgtaaactacaggctctgtgctgtaaactgtaggctgttcacccatcatcactgaagctctgcaaatgccatgtgaaatgtcaataggagtataccggccgttctttccagcatttatcggtcaaattggtaaggaaaggtaatactcctactattggcctgcaccgggagtggtcctaaactgaatcgaacacatcagcgctgcaattcagaaagtcacatgcatttctcatttcttgcaggctggacgggcctctctctctctctgcctagcaggtacagccaatttatgccgtttactctacgacagtgacacagtgtgaagctcagagcctcagactggacatatcacaatcccgtcccgtaggtgttctttttcttcttttgtcatgaaaaggtgcattgcaaaaaaaaaaaaaagatactgtggtactgttcatggatcagagaacataaatgatgttggcagaacatttgtgattttttttttctggtagaagatgagctgttggtctgaaattaatactccgtacagtgtcttcaattcgattcctgcatcctgctggtcattctttactttcatgtgtgttgttcttagctacgacgaattctttaattatctaagaatgtgttattccgaggagtgcaactgctacttcatcatattttaactcgagaacatactaggaatgtagggcatggcatctccggcaagtgacaaaaagttttttcatgaaattaaacaaacgagaggagtcaatatcggccactttgtgcttactatttatgatctgcgcacttcattaatctaagaacgcaatcaactatatataacaattattagactgaacagtgagacacggtacggtactaacaagttaattaaatgaacacccatgagatgataaggcattaaacaaaaactaacgaagtgagatgagctgctatgagttgtgtgaactcatgactgatgcatgtaaaacaaagccacttattagcaaatgataaattagggctaattatttttttaaaaaaacagattaatgtgattttttaaaaaaagcttttctatagaaaactttttataaaaaagcattgtttaatagattgagaagcgtgcgcgtggaaaaacaagtaggatggagttgagaatattgagtaaagaaacacagcctttaagtcgtgtggcttacaggtgatgggctcggtgacgatggaggcgtggtggtgggagtggtagcgggagtagaggaagtggtggtgcagcgcgcggtggaaccagtagtagaggaactcgacggggcccgtgtgcaccagcgccgtcaccacggcgccgtccgtcctccacaccggcatccgcctcacgctcggcatcgccaggtaccccgcgtagaacaccaacccattgaacaggatctggtcatccctgcagcacgcaacgcaaatcagcacgaatatatacagtggtggtagctgcttgttgttgttgttgttgttgttgtgcgtgtgcgtgttgaggtgactgaccagcctcgctcgcggtcgacctggtcgaactcgatgccgcggtcgacgatgcggtgcttgctgcgggcggtctggtagcgggagaggctgatccagatctggttgtggatcatccgcagcagcagcgacggcaggatgagggagaaggcgatgtcgaggtcgccccacccgttgcgcatcacccggcgcgcgccgtgcgccaccacgggggccatcaccacgtactgcgcatgccaccccatgccatgcatgtcaaacaaagctactagccgagaatataatcatcttttttaggaaactgcatgcatgtactgggatgtgcaattttaaggtttggatttggctggccattcactgtatgcaaacaactgcatctgttgaagttcatcaagaggaacgaacgggggagcaaggaaaaaggatgaacatgttttcttcgctcagaaatcagaaggtgagaatttgggcgtgtaccttgaagttccccagcctatgccacggccattcggtcaaagggcccggcctggtcgccatggctacgctgccgtcgctgtggtcactctgcctcacctcacctcacctcacgtcctcacctccccctctttcacgcaataataccgtggctagccaagcaccaacccaacctagcactacccactgcttcgccttttatacccgtgttgagggaggccgtgagagaggcgtgaagcgcatatggagacgcacacgcctctctttcctgtgcctctctcatggtgtgggtgtctgtgtctttgagtagtcgtcattcaatcgagacggtcagaatcagcacaagccacaaggtcatcgtctgtggccactgtcactactgcagccaaggacaggggctccaatcaggcaggcatgcatgcatgcatgcagagggcgcattgatgcgtcaaaaaaagagagagagaaacaggtacagtacggggatgactcagcaccttaatgcggtatactgcggcgcggttacgccataacgcgggcgcggcggcctccgtgtttcactcttgcgttgcggcgcgcgcatgaggcaacaaggcaggcaaaggcgcgagagctagcggttgcaacaactgaaaaagtttcttccggtcggtcacgcaggacgcgcttgccgacgcccggtgcctgcctcgtcccgggtatgtatacaaactatacacggcgacgtgttaggagtagggatgtaagtggagcgggtaagcgggtttttttagcccgcttatctcacttctagtttattttttcttctaaattttatactaccacgtgaaaaataaactagcaaacgggtttttatacggatagcgggactacccacttgcattcctaatagggagtcgggaccgagcacgcaacagcttgcgatggagtcaccgccccgtcctcatttctcccccccctcctcatacctagacagagagcgaagccagaggcgatggtttggcgacgagctcgacggagagaacgacgatgagctcttcaatccctggccaccgtcttcaatcgtcgccgtcccgcaccttcttccgccgccggccaccagatccgggagggtagccggtagcgagcagtggggaaagagagggggctgcagcggtgaccagcgcagcgagtggaggacggtggcagccagcagagcgggtggaggacagcgacgaccagtgaccggcgcagcgggtggaggacgacgacgaccggtgcggaggaggagggttgcggcgatgaccagcgcagcgagtggaggacggtggcagccagcatagcgggtggaggacgacaacgaccggtgcggaggagggctgcggcgatgaccagcgcagcgggtggaggacggcgaccggtgcagcaacgattagtgcggcggcgggaggatgacatcgacgagaacgagatgcacattttttttcttttctttctttttatttttttccctcacctgttatagcgtatataaagcggcgaattattgatcgttggcaccatttattttttttataattctttataccaattcacccattacatatgcaacagattttaacaaaatttggctgattgaatagtactataactacaattgaatggtacactaaaattgcaaggggtaatcttaccatacaaaagaggaggtaaccatattctaacctcatacaccaaaccaaataatatctcttgtatacaggattaatttgcgcgtacaatcaaccaacttaactcgtacaaccaacctaacaaccctatttgcacccacctatccaggctagggtaagcctggatggaacatacggaccaggctagaatggtgcaagcaaaaccaaacacaccctgtaggttcgtctatttcgcggcgcggcgatacactggccagcagcaactagccagcttgtgatgccatggagttgaaaagagaagcgttagttgctactagtatcatgctagtcaaacttagaataatgaaaaggcacacgagagatttttcccgcggagatagagagagagagaaaggaagaattttcctttccaccggtacaaaatccctcattggcggtgttcatctctgttaaaattacatattttattcgactttcgttagcccatcttttaaattgctaatcggtatattttatgccaaaaattttctatataggtgttgttttaaaaatattaaatgaatttattttttaataaagtcatttaaagtttacaataattaaaattcaactaatcatgcgctaatgattttcttgttttgtgtatcctaacttcgtattcatcttcattataaacaaataccatcaaaagtttctccttgctgatataatggtggaggtccacttccttataatctttttcattccgaaggttcagtaaggccattcacagtgtacggtgaggtgaagtttggcctcacatagctaatttgaagatcttcattcacgttagtatgggttgcgcctctataagaacacataagtcttattaggatgaaggcccatgatgcatgaggcaacggtcgaaatcgtgtcgaggagtcggggaagtcgtgcccttaagatgtgaagcaccagtcccctcctgaactttctccactgccgctgtcgagcttcctccgtctttgccaccatcgatctttagtttgatctgacgagccacccttgttggagtggccttgcacgctcgaggaagtactcatgttgtcgccgccgccgcctctcaaatctagatctgacgagcctcgggctagatctaacgagctcggtgccacagagtgccgtgtcgggggcattggtcgaggggactcgctcaccagcaacccaattgcattgatgggtaaaagagaaggaagagaaaaagaaagaggtgaagaaaaatagtcactaacatatgggccccctgactcagctggttagactaggtcaatgagccacatcaacaaaaaccgcccgcaaaaatagccgagggagttaaattggactgattttattggttagggagttaacatttgatattgatgttgagtgatacaaattagattgaacctatatttcagagttgaaatggacttgttccttgctctccccctttgcgcgcaggattcaaagctgaaacctggcccaaccgctggatgaagacacggcccaaccactacgccccccgcgcgttgcgtacgcagcgtacctcatttcccgttgcctctctctcccgtcacggcctcgccactcacccacccccattcgcgtgctctatgcctttgcctcgttgccttgccgtgtcgctcactcgcgcgtgcacggctccacgcgcaagcggatgcagaagcataatcgtagtcatgaaaaacgaaagcgcacggcacggaactacgtaatcagcccgaggccagttcgtccacactccacacgaccgcacagctctgggtcgtggcgatcaaggggcacgcggcgtcgttgttcctggtgggagaggagggggaggggggaggcccatgcagcagcggcactttgatcgccgtgccggtggggctccgctcctgggtttacgccgtgatcctggagctgctcgcgacgaattgggatgaggtgcagttatacatgaaagttgcaaccgcgagataacaactgcacgcaaatttggttgtccgtttttatgatcaacggctcagatcgaatgctacagtaacaacggctacagtacttcatgctacagtactttgtacagtacagtatgcaatctggcacgcccaatttacatccaatgacatacactgttactgtttaagccgatccaaatccgctcgcgacggagggacgagattgcacattctattttggtcatgtttaaatcccacagaaaaattttacaccctatcacattgaacgtttgaacacctgtattaactattaaatataagcttaaaaaaaatactaattgcatagattgtgactaatttgtggaatcttttgagcttaattactccatgatttaataatgtggtgctacagtaaacatttgctaatggcggattaattagacttaataaattcgtcttgcggtttactgacggattttgtaattagttttttttcataaatacccgaaaacctcatgtgacacctatataatatccgacgtgacacgccaaaattttacaccactagatctaaacacccccttttgttgaagtctggagcctcaaggaaaagagcttaccaggcttctagacgtgcaaaagaagatttataaaacaaaaggtatttattacaaaacattaataactacaggatgcttcttcgcttgtgcagttgtgaattgtgatacgctgtacctggtgccgttcttttctcattcgtatttccattaacaagaatataaatgtagattacaaaagcagaaataagatgtttcccattagattgaagtaaggggctatgggcgttacacgcctacaagctttgttcaatccctccatttcatacagtaccattcatgattcatgtagcctcctccacattaaagaaaggacaatgccgaaattcaggtttaataccactgattcgtttctagagcaagtgatcatcctcaccgttatcctcgatttcctcatgatcatctgctattatatgcaccacagcgtcaggagcaacaaatgcaccttctatgattatctctcctgggccctcctcgtgtatcccttgtagcctcatcaacctattgaagagtgctgaatgatcaagttccatcctgtggtcaggggtatgatgctgattaaaccggcctggaagtttcgattttgtattgtagcattcttcgcagaggtcaaatccaattaattcagtgcagtccttacatttgtacctcttccctcgtattggatacatctgcaatgcattcgtcaatttcatattagcagagaagtgagaataaaggcatgatacaaatgtaccttataaaatatttaaggcttcctttttgtgtaaaacaatattccctccgtcccaaaatataagagattttggacggatgtcacatctctccaaattcccttatattaagggacggtgggagtacattagaaggtttaaaaccagaaaggctagagaacactaaacaactggacacataacttatgtaaacctcgtcttgcaaacaaatttctaattttccaacacaaatctacacttgaattaagtactaataacttaaataaaatttgaaaatgtgttcccatcaaagtgatcacaagatagaatatggagattgcaacaacttagtgtgaataatttaagagacgaaatcattttttttctggcactgagtgaacccaaagtactaccagtaaccaaaaatcactatttgggctgcatggtggatattactaggcgactagaacagtttatccattggatgtatgttcaccaaatcttaaaaagttcacaacttgtgcataccccgcatgaatcgcatccaaccccaatatgaacatctgacaagtcatcatcctgatgtgcacggttttccttatttgttggtctacccctgccttcttttatgcatgaagtacctaaccacaccacaaaaaaaaacagttagccatgaaagaagaaatcagttatggtattcctttcgaaagttatacgtatttacaaagatatcactttcataactcgtgcccaaactttccataaccaatagcaaaacaggaaaggcaaattatccatgctatcttttcagacaattgaaagaactagcccagtatcgtagagaattatagtagatcgaaaccaacttcctatgactgtcccagaaagcagcaagctggttcctctcactcttccagtgctgtatcactggttgtggcctactgacctgtaactggggtagtataaaatcttgtggttaatttctacaaactattgctaatattcatctacgcatttcacatcataggataaatcatagtggctattggcatataaatatataatactcattgttaccagtaagatagtaactcccttcggtcaaagcatacatgacttttgacttttttacagtcctcaaagtacagctttcacaattttatattggaaataaatttataaattctaataagttgatgatattatcatagtgattttcagggtaaatcttcacataacttttaaaaaaaataagctaagcattttaaaagttattgatggggaaagtttcaaaagtttgactgaatcttgttctaaacgccaatctcttcatgcagaagataatgctacaccatatactagaaatacttcacataagcaacatcgccctatggttagaaaattacttctaaaaaaataataggatcttttccttaattttaatatgctgtatcagtatggtatataagaaaatacaccatgtgagataagcttacctgaagatgatccttgattgcattcacccttcaaaagcttaatcttctctcgtcttaagtcatattctgctggaaaatagtcttcgataaaatggtccaaatccaagcaaacattaggaaaatctcctggatgaagacctccacaaacttggcatttgagtgcaccatcatccaaggacgacaaacaggacatgcagtacacttttcataaataaaggtaagtcagtatgtgagacaattagcgcaatacgtaacattttttattctagctttaaatcttaccatgaccacaattaagaacagcaggttgatacaacagctccttacaaagagcacatgacacgtcctccagcttaactttcttcggatgcccattgatagtgttgccatcagatgtaacttcttgtggaggtcgactattactttcttcaggtctattctccccatcaatttcttgcagaaggtagcacatcttataagttcaggcaaacttgagagctgagacaaatatcattgcagttgtatggcacaattcttaccacaattgttgctcttggagtttaaaaactcaatgatttgtggagaatatgtatccacacgcttctcatcctctgagtcgaaaccaaaagaagagcatcagtaagaacttgcagaaaaataggacgtgctaattactgaaatcaggcaaacagctattggaagaggaaaccatgtttggtttgttaagcgtgctgtaattcttgaaactctggtgctacaaaaaataagccaaaacgtaaaactggatggactcatccatatagtgtgaattgtgaaatttaagaactgtcatggtaactgcaaagcgaaaaaactctgtgttgttcagcataagattgtgaactttttctacactttcaatatccattaaacacaaactctaaggcaatgtattcaccaatatcctcctcatccaatgatctcacccaaaacttacaaatccctatccccatattgccagcaacatcctctgacatccatgtttgcacagccaactaggaacctataccatcgatgccataacaacctcaccctctacatgaatacaccatcacattcccttctgccctgatgaccccaatcaatttggatttgatgaatttgaattcaaattatgaaattgcattattgctcagtagaactggttgtgttctagcactttagatggcagtcgcaaaataattttgaaatataaatgcttctataacaatccaaacatgacccccaaaaaattgaactagatctgcaagagcatcgaaattgacggtgtattcatatgcaaaacacaatacatgcagtatccatacttcgcaagaaatacaaacatttactatgaacagtattgtttatattatgaaagaggtttaatggtttggattttggatacttacctagtacctctttttcccttcttttgtattccacaggttcaagctttataagcaagtgatggaggagttgacagatactaggaaaatgtttataaggctgcctacagacagcacaatgagactccctgatgatatgcatagcattgtggacgcaccagaaacatgacatatgtccacatgctgcaccagtaattgataaatgagatttcaaaaaatatatactatgcaatcaggttgctctttatgttagcatgaacagcaaactcttaccaataacaactggtttgtacagaagctccctgcaagaaagattgaacaactacataagatatctgtgctttctttaaatgccatcatttgcgaattaacacaatgaccagagattcaaaaccagtcaaagtaaaaaaaaactacagcaagacaatgtgccttttcagcatttacaagagaaggccaatgtaaaacgcagtttagacaaatggcaacaaaacagactgttgcaggccctccgccatcaaaggtctagagcatgatctaaacctatttagatgttcccctaaatgttgcaagatgtcgagctcaacaattgcttttcccgtcacctagagcaaattatggctacaattcgtcaccggtattcctagatggagatcttacattaacaatatctaagcttaatatcactacgcaaaaatttagggacggcgcaatgtatagagcataaaatcgatgcaaaaaagaaaatatcaacgacgaaaataagcggcgaattgcactggatcaaaagcgagggcgcgtaatcacgcagcacgaacgtccaatcaacgaaaggggatcgtctgctcatacgccggcaaaggtcactacaacatgggcggagaaaaaaaaaacagagagaagacgcggcgtaactcacaggcagacgcagcactggaaccggaggtcctcctccagatcgccgcagccagctcccgccgcaggtgcggcgttccacaccggcggcgcggccgctgcgtcccccggcgggttgccgccgccgcagccgtcctcggaggccatcctcttccccctcccacccggcttcgccccccctcgaacggaacgggcggtgtcgcgaggaggcaggcggacgcgaggccgcgagagagaaagagagagagagagagagagaagggaagctcgaggtcgcgggtggcttggagccttggaggcgaaggaccgaatcggaacgaaggaacgggacgggggagtacggggccgatgaggtggtgcgccgtgctcgagaggtgatctgatgatgaggaggaggaggaggtgcccgccgccgccatcggttgggccgaaaaataatgttccgtggcctttcctgacacgattgcgccctgcctggcgtgcggtgtgaataatcttgcgccacccaacaagcactaaacattccttattacacaaaaataatgttacttggagtagtataaaaatggaaattagcagttaaactttgacaaaaaaaaaacaaaacgacgtgttacgggagcacatatatactttggtgtcggtatcgcagtggcaggcctgacttgtcgcctgtgacgggccgcggcctgtttggcctgcaggagcttgcacggccgtttccgcacggcacaggcggcggcgcagcacgctgcacggtgcacgcatggcgtcgtcgaaattctcgattaaaaatcacacgggttttttttttcgccgtgctgatctccgactagacgcacgcacaacggtgaccagccggatccggatggggaggaggaattcggtctcgcatcagggaaagcggggaaaggggatcccgaaaccgaaaggagggcagggctggattgattgattgattttggcttttcagttaaaggacagagcacgcaaagccacacaagatgacttgtgaactgctcgacggagtgacggatactgaatactgatgagcgcgcgcaggagatagaacaatatgcacatttgcgcaaaaatgcacaggttctcaccgtccgatgcgcctacgtgaaaaatgtgaacagattatcggaccacgtatcacgggattcagattagccacaaaggctcccatcggttgcccattcgacccaaaatagcttatttgacttattagaaaattaaaattaatttataagtaaaacttttgtagatttattcgtaacgacttaaaagccaatattaaaaaaaattacgttaaaagtatttcaaaatcaacttcaaaattaagttcaaaaattcaaattttggcttattctttagctgtttaggccaaacgatggggctaaaagtgtcgcacacggtcacagtcttgataggttacctttttttttttacacaagttgtcttgatcacgttttaagaccagttactgtaagagcaattaatagtagtagaactaacaacaatatatatgtgtatattagagttaacatttacaataggttagatataagattagctctatttattatcttctctcttttactctggctatgaacttataactaatgtatttatcttagagcatgtggagagctagctcatgtgtgagagcaacatttctttttttttctttatttttcttctccacgtaagcttgtaacacactactatccttattctaagcctctagagtcttactccctctgttccagaaaaagcccaattttagagatgaatgtggacacacatgtgtccagattcatttttaaaattagaatttttttttgggatggagggagtatacactaactcaagatgttacatatacttaaatgatgagcggagaagagaggtaagaagagagaggataagtcacctcacgtgtaaggagtagcattttcagagcaagtttaatagtatagtcaactgctacttctaaaattgacatattatctatagtcattttaatagcttacccatagaatagttttatataaacatatattgtatcatttatactttggtccacgtctcatacacacataatatctcggagcatgtgttgcaacttacaactagctacaaatatgtagctcatttttcttctatctcctccccgctgtcctttacatgtgcttgactattgcctactgttgtacttagctctcacaaactctaagggagaaaatgaaaagagtgatattgattagatgcaagtgaataaaaataaatagtagtattgtattggagatagtgtatactacatgctacctcctccatctcaaaatataagggattttggatggataatatacattatagttctatgaaatttgaataaactctctgttcagactcgtagtactagggtatgttccatccatcaaaaatcgtttatatttttggacggagtgagcctccgttttataatgtaagtcattctagcattttctagattcattaacatcaatatgaacgtgggaaatgctagaatgacttatattgtactgtgaaacgaaggaagtaccttctaactaattagttgctggcgtggataaaattagaggcgtcaatcacccctgccattaaacttgctatgaggcgcatggctagcttgcgctgtttggcatggatgcaggggcacgacaatggttggcgttaggcagtgcttccaaacttctagcttgtgttagagatgctgctagtttttaatgtaatattggttaaactcgaagaaatttaacttagaataaacttaaaacaacttatgatatagaatgaagggagtattattttgaaatgcatgggtgctagatgcaaatgtgttggagctttcaaaggaaattgacaaaagttagccaaattttcctgccaatgatgtaaaatttgtctagggacatttccatacagagggacttgaagacttgatattcgtgttgctctcttcgagcgacccaggaggagacgcacccacatccccactgcatcatcggccaccgcggccggtgccaccaccttgactcaatgacattcctcacattcttcttccttttcctgtggtttccctccttttccttagatttggcaactttcttcatctattggtaaccgttgattgtctagttgaggtggccttcttccttttcctcttcgatgcccttctcatcatcaataattgattcttccttcctgcaaaggagagctcaagacacacctagatctaacgccaatgtctactgtccctcggtatctagagcttacaacgaacctggacgaggccttaacaccacgggctaacccggataactcatttcccttcgattcttcccattttagacggattttggtcataggttctgttgcaagtatcatggctaatggtgaccaccaatggctccattgttgctaaggagtgaggacagcatccgtgttcccttcatcttctctttgtgcatgcctgagcttcaccagctactcaccttggtcttccttccctgctgtcgtcgtcgtcgttgatgtttgctagttccctgcttcgtcttaatcatttttgcttggatgtctttggccacaattttcgttggctctctctcctttgggcttccttccccaaagaacattggagagtgttgaacttacttgcaacttaataaaacctaacacttgatggcttgatgtgggaggccatggcaaaaatcttcggtgggtgctctcccctttggcttccttccctcaaagggcatcgatgccggtggccttcgacgaccacaaccgttgaacgtcggaaatcaagtcagcatgattgtgtggtacaaggccctccggcaactttcattttcggtgcttcatgtatgtccgttaagtggatgtcttcgtgtccggtagctctgatgtgaatggcttcagccttgatttccacttttcttcggtgcaacatcagcaaagatatgacctaggatgctagcattagtttgtgcttggcatttggcagtgtgtttctgttggtgaaataatgtcacatacctcttctcttctatttgggatatgatgatcccctgtgttatcttcaggggctctttgtgtttctatcgtcctgtgtaagcgcatctgaatatttaggtgtgtaagcacattcaaagtaatgcatatttaggtggacacttcgcccctgtgacacttatattttatttcattttttgtgtgtctacggaatgcatctggataaacactagtgttgcacttatatcacaccaaaaccactgtattctgatggcgccaattcctgcctccctacctttgccccaatcggttatcttttgttgttgcccgcagctgtcagtcacctggcgtgttgtacctcttagtccagtagtacgcgtctcccgtgtatctccgtcgctgtcgacacagcagtgaggccaaccacttctgcgcaacggtcgtcactaatgtggaatggttgttgattatgatcagatcgcaaggacggtgcccaatgtgatatcgcccaactttgggtacagcgattgcaatcgtctcgccacaaggaatcaacaccttgctgaaatgagaatagctattggtgctcctgctggtttcacgcgaaaatgtttccggttctcgtttcaaattgagcttgagattgtacagaagaaaccgtgtatgaaccaaagttcatcttgaagaagcgcggaattttgagatcaaaccttgaaaacgtatacactgcagcagcagagaccaaaatagctcataaaaaagcgggtcaaactgtcaaagtacccaagtccttcgattgactctgcataatttaaacttatctggctgctacgacattgaacaatttgacgaaaaccaacaatagcccgctgaacaagaacaaagacttcccctcttctaatttaaaaaaggaggagagactagaaaccatagggtgttgcacttttgtttccctgaaacaaaaaagaatgcacaatggcgtcgtcctaactcctaaccatgaatatacacaaagaataaatcaccacttcatcaaccgtgtgcaataaaatggcaaaattttccaacacaaagcattgttgccttttgcaaatactagattaataaccggatcggtggacggcaaccacagattttagattcttcgatttatttaaaacaagttggatggactaaacgtataaatttaatcatctggaccgaaactataacattgcaaatctggaaacagtacagcaagtatattaagaatgaaatcaaactcacgaaacagagaaaagcttcactcgagatgtaaccatcgttccacataccagtagcacacatggcaggttggcattaacggggctaaataacatctcgtttaattctgtacatatatgtatccactaagcacaacaaatcgtgcgttgataggtcattcgtcaaccatttgctacacttttgagacacagagttgggggataaacacaccggaagctaagctagcgccttcagtttcaagttcaaacctacatgatttttttttcttaacatgaaaaaaagcatttaaaaggaaaagagacgaggtgaaagtaaaaccacttgccatgtccgaagcatccgttcttctcttctttcgctccgatcgcttcgggagacgtgcatgcggcaccgcaagcgacccaccccgccaatgccgcgacggcgaccgtgcgcctcacggccccggcggttctactcctttatccggagccagtggccgagctgcgtcgggttgacgacgccggggacgcgggctccgccggccatcagcagcagcgacgcctcggcgtaccgcgtgcggggatcgggcgccgccggcccggcgctcgccgcgggggcgggggccttgctgttcgactccggccgctcaccgaggagcgtgccggacctgaggaactcgtgcgccaggtaccccgccatgagcttgaagctgctcccgccgccacccttggggaatggcggcggcggcggtggcatgggcttgacgaaccgagcggggtgagccggcctgggcggctggggcctagcggacatcgccgggaacagcggcggcggcggcggtggcggcgcccgctgctcctccgacgacgggcggtcccgctccttccgcttgccgagcgtcccgccgccacgtggcggctccgccctcgcgcagatcgacatctcgacggcccccgtgccgccacgccagcagagcagcggcgagacgagacgagacgagacggaatcgctcggcgatagcgattggggaataaacaaagggagggagaaaagggagggggcaagagaaagtcgtggagtgtggggaccacccgaagatgataggggcaatttcgtaaattgcacgggaggacaagtggatgggacccacggaaacggccacgaaacggccggacgagagggcggggcaaaggggagggaggaggggaaatgaagaggcgggcggggaggagcggcttgggtggtgtatttatgcacgggtttgctagggttagccatcggatttggttgaaacttcggtattgccatcgtgaggggatgtagtgaggcagccgtgtaaagataggtatgtagttctggcttaggtgcgagggtataatggtcattgacctgggtttattgtggttcggatttgggcctttttgtgggccgtgctacgtggcgggacttgggaaacatatggacaatcgtttacccgccaaggtggcaaatggtatgagtaaacattttgttttttttttcactaacattttttctaaaaaatagggtacagataagggggctcgcacacatctttataaatacacacatcttatctttaggggcatctatgagaaactgttccagtatattttgaaattgacgaaattattatgagcgactcgttgtcgatgggtataccttgtatcactgaaaaataattagtcgtaaatatgagcactcatactaaatttagaacttaaatctatcgcaggttctacaataaaaaaccaattaagttaaacctcacttttgacacgaacattttcgttttctttcttgcgaagatagcttgcaatcgtggccatgccaactctagaataatttgattggtgctagtctgaactaccatgcatttgccgagttccaattgccaaacaggtatactggcttgggtgtattcatcctaattacagcagtttctttgctgagcaaaaggaacaaaagttgtacggtttcttgagtaaatttccacgttttttcttccatgtgtttttcaatgtaaatgaaagtacggaaacaaatctcaaaaactcctttggtccaaaaaattcaaatcccatcttttcaagatatatttaaggagcaatacaatagacttaaatgcctctaattaatagagaagttatattactggatggataggtgagaggtattgaaggaatagaatttatatagttatgaaccaatagtaggtacttctaagaaagtatagttgctttattttaggagaagaagttggtttattttggggcgtaaccgcgtaaggagtacacggtacatccaagttatcatttagctatcagctaccgcaaacataccaagacgactacatccggacatcccaaatgtgtttgcgaggttgttaggatcggaatattaggttggatcattctatttcaaataatattgtaggcttgggatctatcagatttttataaggtacatattttttatataaattttgtaacatgttttaaaatttgaagtctctagtattaattttgataaatttaattggtactcaatgcatttcatattataagttactttgatatatttttttctattaaagcttctttaagtttgattaagtttataaaaaacagcaatgtctacaacaccaagtctcatcaaaaccaatatttaatatattttgataatacatttgttttgtgttcaaaatattgctatatttttctagaaacttggttaaacttaaagaagtttgaaaaaaatcaaaacgacatatgatatgaaacagagatagtatttttttaaatctcagtaggcttattcacgttattttcaacacacatgaaatttaaaagatgcttatgtagaatcgtagggtcgagatcttatgtaaggtcctaccaatctagtgagatcatattaaactcttatgctgttcgtgatgctatgaaaattaagataaatgatgggatttccatcgttttgggttggcatatctacgaataagatatgtatcagaataccaacgacctgtgcttacaacatgtaaagccgcggtggtctaggactcttgggacctatttgggggagtttccggtaggtgcagcttatcccagcatcagaagctccctcaaataatctagcttttcgtttaaattctgagaagctacagttgtaaaatctagaaaacaaactaggagctagaagttggaaaacccaccttctccatattcttggaagttagctaccaactaattgtttctcaaaattttaaactccccgaatacaaattggggcgtgtttgattacttgcattgcatgtgcctcccagtgccactttcctgcactgggctgtgtgggctaaactggccactgcctaaatgtgtgtaaatcacagatttaggccagcccaacaacatttcatcttagagcttatctggacctgtccagcccatacagcagggataccagttaggccgcttaggcccatgaaaagtgtatcaaaggctcgaagcacaagtgcctctatacctgagcaaccgcgccctacattcatctgacaatgacatatggaccccacagttctgggacccacatgtcagtgaaactgtcgtgatcctacatgtcagtcaaacgcgccggcgtctggtccctcttcctctcctacgccgccgccgcaccctctcgcaagaaagaaaagggaaaagaagacgagagaaaaaaccgagtgaaaaatcaaacccgcatatagagagagaggaacagcgaaagaccacgcgtgccatccctccacgcttgtagggtttccggatcggaggagagagccccccacgccgccgcagccatggttcgcggatcgctcgggaagctggcctcgcgcgccctctccgtcgccgggaaatggcagcaccagcagctccgccgcctcaacatccacgagtaccaggtgctcttgcaaccccctccaccagatcccgcagattcccgcaccatattccgttcgatttttgcgggtttttttttggagtcttcgatttaggggcctgggctaacgcgctagggttcgtggatgtgtgggtatcgcagggcgcggagctgatggggaagtacgggatcaacgtgcccaggggcgcggcggcgggatcggtggaggaggtcaaaaacaccttgaagaacgtcttccctagtgagaaagaggtgatgtttccgttccttattctttattgcttgtgcggccaatttgagacttggttgtggcagttatttgatggtattaggatgtatatagagaatgtagtttactgcaatttctgctgatggcctgaccagtttttctccagaggggaggttagtggttgctgtagtatacgggatatagtttcatataatacgaatgggtgaaatacatcactgttggtgcctggaaagtaacattacttgtaattagtcttagctactctggtatgacactattattggtgttttgagtaatttttcaatgctgtttagtcataggactgcatataaactttttttttctccttttcaaagattatacacccacatgtggtctctttaaaataatcatatcttctaggaaaatattgccaaggtttatagtcaatgtggcttgtaagcccttaacttggttaaggggaaaccttttgcttatcacaagatagtattggggtattccgcttcaaaatgtttgttattccgtaaaactataaagatgagtcagtagatggtaggctggcctactccaaaatcaaatctagctgattgttgtccctagcctactttgtagggtagatctatgtattattgcatgaatcattttgtggttcaattcagccatactcaaaacatgacacaactgcagatagttgttaagagtcaaatcctggctggtggccgtggattgggaacattcaaaagtggactgcagggtggtgttcatattgttaaggcagaggaagctgaaagcctcgcaggtacgagttaatgtcagagacttacgaatatattgaacagcagcttgacaagtttctcccagtatgtgcttcagttgtttgttgcttcagatgataatgggcagctgatttagaagtttatacataactgttccatgcacactagtctagcttcacagtctacacagtaacctccaatgcaatttattgctattatttggttttggcaattacatgtgttataatgaaatatgcaagtaaagataatcttattgtatgaagtctgacatccttgatactaccttcagatttgaataaatccatatatgataggtgatttattccttcaattgattaattagttccttacctttctcaccaacttaagatttggttatttgttgttttggttctgagtttgactgcctcgatgccttatgatttgaagtgaatggccttttaagtgacatgcaatgctctcttttcttcatagtcattcaattcttttcttcgtagtcattcaattaagttgtatactatacatgttatttgtgtatgtactcctacttttaagtgtttatgttatctcctctgcagcaaaaatgcttggccagattctggtaacaaaacaaactggtccacaggggaagattgtgagcaaggttagtttttagtaatatgtagcccccttcagcatctatattccaatttgaactgcaatcagcttgccattttgttttgctaccacagtttcatttggtgtttccagcattgttagaaagtactgttgttgtgtttgcttgattattgattctttagtaagaaagctttttatcactatattttttttgttgcaaatatgtagaaggttaagctttagcatatgactgtgttcgcccaaaacagtattgaacttgtaaatccaatgccgtttaatgtacttccatatgagaaataaatggaataattggaagaagccattacactatacggagtgccttttttggtgcatgctgtggcaatgattgtttcccttgattcttttttcagtctaatcatagtggatcttgtagttattacttttttgaatgcaaatttagatgcaatttcatgtagaaagaggcttacacaggttgtcatgcgactgtccataagttctgcgtctttcactaccttatctttcaaagcaagagtcacactttttaatgctctatgtttctgctcaaatcactgaaaattgtcaagtactaaattcgttgatttgtgttttgacaggtctacttatgtgagaaactgtcacttgttaatgagatgtacttcgccatcacccttgacaggaatactgctggtccggtatgtctttgaacacaagcaattttttgtattgctcatttttctctttttatttactgagttttgttctattatttgaataaattaaggaagcttggtattgcacacttttccatctagattcagtatttcttgtaacctagattctgataatttatgagactatgttaaggagtggtaagtactaaaatatggatcaattttccacaagaataacagtttgttgttgttttgcaaccatgtgtacttgtttattttattaattttttcaataccataaactaacaaagtgtgcatgagctgatgaaggttcacataaatctttagtcaacggataatgggcttcacaattagtaacagataattgcatgcagtagctgtgtcactaagcatctttgtaaaggtcaagcattctaaggctgtgaaccaataattattttccacttttgtattgttttttttctcaaaaatattttgtattggttttggtataattataaattatacatgggaatgatgtaatcaatccttcgagtaggattacttttgtgctcacttctgaatttagacgcatcataattgtttttataaatccttttttgctatcattttgttttctttttttgcttgtgcctgaattacttaaagaattaaaccattaggtagttaatatgcatgttcccctatttcagataggggttcttgacttcttgctgtagactaactgattttcactcattttcagctcattatagcgtgcagcaagggaggaaccagtattgaagatcttgcagagaagtaccctgatatgatcatcaaggtaaatctattgcctctaatcaatatccctctgttggcaacagcattgtgtgcttctgcatttttttaattgtttctaatgaaatcgatcatacattgaaatgcaatgctctggattgccaggttcctattgatgtattcaagggaatcacagatgatgatgcagctaaagttgttgatggtctggcaccaaagacagctgacagacagtcttccatagaacagattaagaagctctatgaactgttctgcaagtctgattgcacactgctcgaggtaatcaataacaaatggtatctcatttggaatggcccgctttaccactgcactggttatgactaatttggacatgttatgtgggtagattaatcctcttgctgagacagctgacaacaagctggtcgctgctgatgcaaagttgaactttgatgacaatgctgcctttaggcagaaagagatatttgccatgcgtgacacaacacaggaagatcccagagaggtatattactgcttgccatttcctttattcactttctcttgtagtctgtgtgttcctttatctctatctatgtattttttttttcatttaccccttcttttggaggatggcttgacttgcctctggagggatgttacagcttttgttgttctgagaatggaaactgaagatatttatgagtttatctctaatacctttacaggtggctgctgccaaagctgacttgaactacattgggcttgatggagaaattggctgcatggtgaacggtgcaggattggcaatggctacaatggacatcattaagttgcatgggggtacgcctgccaattttcttgatgttggtggaagtgcatcagagggacaggtataataagctgagaattctttttgtaactaccatctcatgtgaatcgcgccactaaggctgtgttcttcccccccattttcccaatccacctctctcgttttccgcgcgcacacttttcaaactgctaaatggtgtgatttatgcaaaaactttctatatgaaagttgttttaaaaaaaatcatattaatccattttttttaaaaaatagttaatacttaattaatcatgcaataatatgagctttgttttgcgtgccggggaagaggggttcccaaccgaacccctcctcctgaacacagcctaaaagattttcatataactgataatctgtttgttggaatccatgctaaattgttattttgtttttgcatgttatgcttcccagtttggtcatttataaactttttatataacttgtattcaggttgtggaagcatttaagattttgacttccgatgatagagtgaaggctattctagtgaacatttttggtggtatcatgaaatgtgatgtgatagcaagtggaatagtgaatgcagcaaaacaggtttgtcttcaaattttgtatgtagttttcatttaatgactaaagcagcttattgtggttccctcttgcttcaaattaataaattacaatatacctattgaatctttcttattccatggtaaccttttccattaaatgtggaagtttcttatgagatagttttctattaaatttttcagaacaatttcttttctttatgaaagtactactggtattgcatcaagtataaaacatttgagattaaccctatgacaatttcttgtggaatcttgtctgttccacaacattttctcttgtatttgtttgagaaatattcttttaacaattactgtttcttgggaatgtaatgacacagttatttccttggattgatgattttatatttttgttttttgcgggacaatttagattatcttgctggttaatgtacaatataaaactttcctgcactgtattgaatcattctcttgaccgccaggttgacctgaaggtgcctgttgttgttcggttggaaggcaccaatgttgaccaagggaagaggattctaaaggtaaaaattacttgcatgcattctttttttgtaggaatatctgccaagtcgtccttcactggaaactttcgtacctgactgtgatgtcctgttgcaggaaagtggaatgaccttaatcactgcagaggatcttgatgatgcggctgagaaagctgtaaaagcatctgtcaaataattaactatttgtagtataccaacatcaagtttattttttgctggcacaagatgagcggtgctcatgacatatttcaggggtctgaagttgggaaccccaaatccttttgaagtggaattattttggcttgatttcccctagaaacattttggtctactgttaataaacctctgtcggcaccaaactgagcaaccacttctttttgccaaagttaaagtggagtttatctgtttttgccttgagcaagagagtacggctttacactttgcatatgcgcgataactgattgtaaagtctgtaacatcttggctataggttatgatgacgtgttatgatcatattgttctgttctaatactgaaatggtattggacgctagctaatgctatgatgccaactaacccttcttttgatgctgaactgtgcactacattgtgccggaaatcaagctgaaggtgtagtcactttgtattacatatgtcacagagcacctgtgtggcttgtgcccgtagtttggcatactttgatttattacgccttcctctcgcgatcgtgaacaaaattgatcagttatctggactgtttgcggtgtgcatttttcttaaatttgcttctgcgtaattttattatgcctgatcgtgaacaaaattgatcgattatctgaacggtttgggtgtgcatttccctaaaatttggtacttgagcttcttcattcaattatgcagttgacattcgacaatagaggactcggataagctaggactaaagttgatgtagaggcccaggcatctaacaaatgtatttgcctacagtacagttgtagattcattgtaacttgaaggctagtactaaattctttcgccatcaccaacttgtattcggcgctcgtagtgaaatgtcatttgtgttgcactgttttgatgtaaactagtacgaatagctgttagaatcatgaatgaataatcatgaattttgatgtaaactactactgggaatagctgttagaatcatgaaggaataatcatgaattttgatgtaaactactgagaagatatgatgctgaccaaatggaattatggaagggcaatgcacatcctgtcgtgttcttttgcctaatactgcacatctgcagcaatgctagattaaacacatagaattactgattattttgatgcttttttttatttcgatgaaaaatattgcacctacgtgtgcaaatatcagcattaaatgacaagttcgtcgcgaagtcacgaagagaattttcgaaacggaagctcctaattcactccaacttttttttctttggaaatgcacattaatgctatcataacatcgttacactggtgcagtatcatcccatccacgtcccacctgtgacaaaagaggaaaccactaaacttttacaaagcaaagttgacaattgagtatagccgaaaccacgagccaaactagcagtgtcatcttcacatttttaattgatgacactgttgacttttaaatatatttaatcgttcatcttatttaaaaaaaacatataactatcatttattttattatgagttgttttatcactaaaaatttcttactaatatttatgtcttacgtatttatatgaaatttttaaataagataaatgattaaacatatattaaaaattaatggcatcacctatcaatagacgtatgcagcagtaatatggagggcaataccatccgggtaggcaaagtggtggctaaagacggagcactcaactgctgcttgcacagcacctgtcgcttcatgcatgaatgttctggcgttgacgcctcttctgaaatgctgagtcaagagcattgccatatctcccggtcgaaaatgcccgtgcgccatcaacacatttaaacacacacgcatggtttaatttgtttctgatagcatatgtgcagtgcagcgcaggttcgttccacgtccctctacatcctgggtcgacggtcactctattctccaactgtgctcaatttaactagtacttattgtgagtactgtgcatctctaatgtaatgaaaagatatgtgcaagagcgacgaattctagactgaataaagtatgcaggaagcattttcattgcggtgtttattttttcctttttatagagataattacagataatccataacttcacacgacaagaatcatgcacattattctggtcctcgtaacaatcatatacgctaaaacgtactaatcgaatttgcaagctgtgatgttctggaatggactggaatggatgaattttgtagtagaagatacgataggagctaattaagtcgttttagcggacagggagtcggcgatgccatttgcaaggcaatacgctacggactgtatggtgatcatggggttgacgcccaccgcggtgggcagcacgctgccgtcgcacacgtacagccgctccgcctcccagctctcgccgcgggcgtcgacggcgccgtcgcccgccgtggcgcccatccggcagctgcccatgtggtgcgccgagcagaagaggccccacgtctcgctcctcgactgcggcccgcgcaccacggtgacgccgtcgaggaactcctccagcgcctcctcggtcagcccctcgcaccgcagccgctgcccgtcgctccggtgcgtgcccacctccgccgcgcccgccgcgacgaggacccgcagcgcgcgccgcaagccgtcgcggatgtcctccctgtccgccgcgtcgaggcggtacgcgacacgccgctcgccgtgcaccgtccccgacccgcggtccctgaccagggagaagatgtgcaccgtccgggcgaaccggagcatccgctccttcgagtctcgcccggacagccagggcatctgcgtccccgtggcggccacggccatcatcggcgtctcgaggatggcacggtgcggcgcgccggcgccggaggtctccaccttgtgcatcgacgtgatgatgccgccctcgtacgccttccccttcaggtccggcatcgtgtccgggaagtagccccacgccagggcggtcgggtggaggtggaggttcttgccgatgtgcgggttggtgagcccgctccgctgcagcagcacgggcgtgaggagcgagccggccgccgacacggtcaccttggcgcgcacctccagcgtcttcgtgatcgccgggttggtgctcctggccaccacgccgacgcaccgcctgcccctcgccccgccgcgttccagcaccagcttctccgccttgcaccccgtcaggatcaccgcgccgcggcccaccgcgtcgaccagccacgtcgtgtccgtgccgcgcttgtccccggtgcggcagccgaaaccgcagctgccgcagtagtgtccctccgacgagttcctcgccaccgcgtcgaccttgtagcccagcttctcgcaccccttgcggaggaccttgttctggagcccttcctccgtacaccccgacgtcacgccgagccgctcgaacaccttgtccatggcggcggcgtagtcgggggtggcgaacagcgggagcccgtgcgcggccgcccactccctgcgcacgaactcgggcgtcttgaggcaggccgaccagttcaccgccgagccgccgccgaccgtggagccggccaggagcagcccgccgccgttcatcgtggtgacgaacccaccggactcgtagagctggttgatcgacgggccctcgaaggacgtgtagtcccgcgacgtgaagtagttgcccttctcgatgaccaccaccttgtggccggccccggcgagcaccgcggccgccacgcccccgccgcagccggagccgacgatggcgacgtcgcactccacccggcacacgttgcgcgccgcgtcatcggtcaccgcgaggcctttctccgcgagggacgacgggagggacgcgtccgtgaggttgatggtctcgaccacgccgtcgtcgagtggccgcttcgtcgcctcggtgtgctcctccgccggcggttcgtcggtcggcgggctgtacccgatcgctcgccagtgcgggttctctgagctctcgtcaatctgcaggaaggtcaggtttgttacatttttctttagtactcctttgtttcatttgataattcgtttgacttatctgatatactaattatttttaagtttaactaagtttataaaaaatagtaacatgtactgtataacacaaattaattttttaaatttaacattaaatatatttaatataatatttgttttatattcaaaatgttaaacgatttatagtaagaaacgaagggagtaatacagtattggacgtcgtttgaaatgtgatattgattactgtataagtttattttcaaatatctgtagctggcactatcagagaggacatgcacatcgacgtcgtttgggggaaaaaaaactactactgtcgctgtccctgtgtgttgcctgactcagcagaaagtttggtctgggcatcaaggcgcattcacctgttcagattcagctttaacgattatgcaattcctaaattcgttgtgtgcacatgatccacactgaacttgtggtcttgtggacaccaaccgccacctcatcatcactgcagctttggcaatggtatagtacaaggttaatcatgcagcgagagaaggacaaggctcattctagaagctcagacttggtgcacggctgcacgttgcgctcgcgccaaaagatctgcagctccaatgtcatgtgtgtgtgccagtgccacgctcgctggcgcacgggcacggtagctgccatcattgacatcataccggcataccgcgatgcgccgcatgcggaggcgctatggcctgcgccaagacgaggcgctgcgcgtccaaaacatgcggctctaatggatagtagtactccctccattttaaaaatataaatatttttaaactttaatacgatgttcgaaatactatttggaacaataatatctataaaaataagatgtattaaataagaagagttacatattataatagtttaataataaacctagtaacatcaatattacatgattggtttttttaattttttaatattaataattaaagttgaaaatagatgacttgtcactatgataaaaatacttatatattgggggagtgggagttattttttttacctaactctaccatttatttttggggcgaggacaaccctacttttctttatagtactactccatcgcatcactatctttatactagtacctgacctgagcctagcatttaaactagtgtattataagtcgcacattggtacgactatggctgtgtttatgtttagttcagcgcaaagtttaaattttaattgaaattgaagatgatgtgactgaaaagttgtgtgtatatgacaggttgatgtgatggaaaaggactgaagtttggatctaaactttggatctaaacaaagcctataatctcctctctattttttttctctctactctcttatctctttcacacgttttagagtttgtttacaacctgctagtgtatacttgctccagtgatgtaataatacacacatcacagtacagtacttaggttattatgttcatgtacgtaagtaaattcctagttgcaccttttatattcatgttgtgccacttttgtgaatcgattttgctatcatctctcgtgtgattttttttgctgtcatttgacactttttttggcctccatacaaccacttacatgtaaaatatacatttgtcgacaaattttttcccaaaaaattgacagatgtaattacagtacaatcgtagtgtaattacactgtaacttatatgtaattacactgtaacttacatgtaactacagtgtaacttatatgtaagtttcacataattttgaatcgttagatctattacaagatttgttttggtgaggaagaaaacaaatcatatcacacacatatgtgaaaggatttgttcccacgacccccattttaccgaaataacatgttacggagagatttttgaaagttacatacaagttacactatagttacagcgtaattacactacgattgtactgtaattacatctgtcaaatttttggggaaaaatttgtcgacaaatatatagcaaaatcgatatatatttgtattttctttaaaatataaaattacagtcctatataactaaatttatattttataaattaggttgatataacatgtaagtgcactgtaatttagataaaaataatgtgtaattaaatatgtatttgttatattcttttgtagttcgttgcatgtaaatctaagggtaaaaaaaatctaggtgattttttttttagaaatcacctgacaaatacataaacagtccccacaacgcttagtccgtccctcacgggcgtacgtacgtgcatccgtcgagagaaaaatcaccgcgcgcacgtgcgtggcgcgggcaaaacgcgagaaaaaaaaatctaacgtgaatgaactcgcagctgatcgatcagcggtgtacgagaggccatgagaggaggaggaggaggagtggttacccaggagtagaagacgtagaggcagaagaccttgacgacgaggaagaaggcgcgcagcggcgggagcacggtcaccctgctccaccgcccgagcgcctcctcccgccgctccaccggcatctccgcgaacgtgagcacgaacggccacctcccccacgacacgcaccgccccccgcacagcgccagcgtccccagccgcgtccccagcagccacagcaccgcccgcaccagcgccagcgcctcccggaggcacatcctcgtcatcagctccgccacctgcaccatcgccggccgaggcttcactctcgctacaggtagctaagcaaaagcaagcttgttaagcgcgtaggccgagttgtagtaccaacctcgtcggggacgggcgggtcggcggcggaggcgaggaggaagtccctgacggccttggcgtcggacgcaccggcgccgccatagcgtccgcctccggcgtcgtcgtcgtcgtcgtcgcgggtgtccggcgggagcgagggcgccagcgcgccgcacagggcggcgagcgcgaccatctgggaggcggagaagccgtgggtgtaacgccgcccggcctgcttccccgcgccgcctcccctcaggagagggtggccctgccgccgccgctgctggctcttctcctctcccatggcgtctctgcccgccgtccggcagtcgatcggcaccaccggcagcagctaccagctagcagtgagtcgtcgtcttcgatggagcttggagactaggtgaggtggtgctacgcccgaggattaataggatggacggggactctcgagtgctaacgccgagcgggtcaacgaaagctgattctaccttccctgtcccggtctgtagagcgagtcccgacatataggattctagatagagtttttttttgttttttaatctttgcttaattatctgttgtgatacgcatcagacattcagcatcaggatgcagttttttctattaaacttagacgataaaaataaaaagagcagatatgtttttgtaatcttttggtttatctggagtgatacgcgtcaggatctggacgcagttacagttaattctagacgataaaataatcagagcgtgattttgttattaatcccttggtacactgaaacctactagaagggcggcgcctttgccgtccactagtagctcactgctcaacggctcaccgcaccgtcgcggcgtcgcctatgcccgcgcgcgcgcgcggtgggtttcagttaaggtacttgccgtgccgtgccgcgccgcgacacggcgtgtcctagcgccgcgcgcgcgcgcgcgctggtgaatgcacgcctgcacggacggctcaaaacggtcacggggggcaagcaagcaaacaccgtggtggtggatgccgaggtagcgtgcgcttcggtttggggggcagttttgcggtggaaccgtgtgcgcctggttgcgtctttccgccttgcaaagtaacactggcggtgtttagattcaaaatttctccgtcaaacttctaactttttcgtcacatcaaatgtttggacacatatgaagagcactaaatgtgaaacaaaaactagttgcacagtttgcacgcaaattgcaaaacaaatcttttgagcctaattacgccatgatttgataatgtgatgctacaataaacatttgctaacaatggatcaattaggcttaatagattcgtctcgcagtttacaggcagaatctgtaatttatttaatattattatacgtttagtactttaaacgtgtgtcagtaataaaaaaattttttgcacacgaactaaacacagcgactgctgccaaagatggagtaatactagtagtactttttagtttttttatagaactggtgggggtaaataaatgaaaagctgctggtaagtgaaaagctcaagttactcatggatagaaggaatactccacatgttacaccctctgtcttaaaatataatatatttagatagactctgtttagatttatggttctataaagcgtctaatctatccaaaatcccttatatttaagggaggaagtagttattcaaagttagaggatagccatgcagatgatctgtttaatttccttgagaattgggatcagttgcaacaggaaaaacacaggctgggttgcaacaagaaaaacaaacacaggctgtgttgcaccaagagataaaaacagtgtgtgtgttctggatctggctcttaccgatcgagctacttctggtatactgcggttagccggttagttgtctccgtttggttgctggatcttcctgatcttgctatacggcagttgctagtagtatatccttattcctgttgtcctggctgtgaggtttgtttaatcactctgtagatcagtgccaggaatatcaagccccaccccacgtctgcaacgtggaggaatcttgcttgcaccagaatcacgagttcacaacggatggcggaagagtaggtggtgatcaatgcatttctttttaatcacgccgaacatacgcttaagacgtgaacacatcaagcgacgatgaatgatgatgtggttgttgtaccttatattgtgggatttgtcagactaatgatatgggtacttgtttgcatggtcatatgagagtgagttgatgtgcgtcaggattctgtagccctgccaagtgatatgttgctctcgtgctccaagttggattcaaagtttagattttggttaaaattgaagatgatgtgattgaaaagttgtgtgtatgacagattgatgtgatggaaaaggactgaagtttggatccaaactttggatctaaacacagcctaatcaaacaaaaagccaattgtactctgaattactccatccatcccttaatatatttttttttatttttttgcttgcactatttgaccattcgttttattaaaaaaaattagaattattatttattttatttgtgacttgttttattatccaaagtattttaaacacaactttttgttttctataattgcataatttttttaataacacgagtggtcaaaacctctaatattaagagacggagggagtatgtacaagttctatcgtttgaccatgtgccgggttcaacaaaagatttcaaccacaccattgtagagaatgaccaattttgcattcaccagcctaaccttgcatcatgacaggcatagcccacttgcgtgtgagggtgccatgcacgctgtacgttcatcttcgaagttgattttttgaattcatttgatcattcatcttttctataaatatttgcgtaaatagacaaacatactagacatggttaaaatacttttttacgacatatttagtggtgtttttgccactttacttaataactaaataattgaacaaacattgttaattagttacggtgggagggcgcctctaggcggccaccgctcctcccgccgctgcagcggaggggccgatccgacctcggccgtcgccactgctgccctcagccgtcgccacgctatcaatccgcggccgtcgcagccgccgccaccgccgccggagggagaagagaggcggcggaggagggagcctccgccgttggatccgcccgccgccgccggatccgcccgcggctgccgccgacgctgccaccgccgccggaggaaggcgagagggggcggagggagccgccaccgctggatcgaccgacgcattaggtggcggcggggaggatggcgaggcggcgcagctccggagcccttcctcccgccggatctagcggtgggagggcgcctctgggcggccaccgctcctcccgccgctgcagcggaggggccgatccgacctcggccgtcgccactgctgccctcagccgtcgccacgctatcaatccgcggccgtcgcagccgccgccaccgccgccggagggagaagagaggcggcggaggagggagcctccgccgttggatccgcccgccgccgccggatccgcccgcggctgccgccgacgctgccactgccgccggaggaaggcgagagggggcggagggagccgccaccgctggatcgaccgacgcattaggtggcggcggggaggatggcgaggcggcgcagctccggagcccttcctcccgccggatctagcggtgggagggcgcctctgggcggccaccgctcctcccgccgctgccgcagaggggcggacgcggccatcacctccgataccgcctcccgctgctgctgggcctcaccgtctccacctgccgccgccacccgtcgcccgctgcctcccctcttgcgccgccgcctgccgcctcggctccgagaaagaggagagcgagagagaagaccgagaggaggagggcgccgtcagccgggtggagggcgccgtgcgagggggaggggaagcggcgcactggtgaggggagaggggagggcgtcgctggttgcgatggcagtagagagaacaccgagaaagaggaaaatgaagggaggagagagaggataagggaagtcgggaaaaacgagaagatgaggagacggaaggatcgaggcgccgcttgctccgctcgctctccgcttgctctctcggggataaggattagatctgacgggccttttttttaaaaaaaaatgagcactctgtatttgaataaaaaaacagcacaagtataccatataaccggcacatatagagatttatagggttggttttaatttttgtttggttttaagtctaatgggcctttcttttacaacttttttttatgtaaggaatatatttttttaaagggctcataacataaaaactaaatcctaacgatctaatatttttatatttattataattttagtttacccgttgcaacacacgtaacacgagcatctatttattaaaaatgtttaaataataaaattttcttgacctgtccttgttcgctctttttttttatttttttattttttcccctcaccgtctaatcttctttcattttttttaatgtctacttattaatatttgacctcaaatacaatttgtaaataaaaaacaatactcactctcacaaaattaataagattgatttttacgatttgttgaagtccacatatttttctcaggtaacaatacacatgtatattcccacaattgcaaagtgggtatagtttaaccggataagtttcttgtggtggaaccagtcaatcttgatttaaatctttgatttgacatgggtgcttgagacgttcgtggtaaataatttttttagcagattagttgtctaaaccaaacaacactttttgtcactgtacacactccgtgatcacccggtgcaacgcacgggcacttttgctagtaaaaaaaaaaatcaaaaaaacgcgtcgtccgctgctctcgtcctctcctcgccagtagccacgccgcctccaccccacgaaagcccgagaagacgccgccgcctcctcctctgtcgaaacatgaattcggcaataataaaatggggtagcgcacgagacctaaaagtggatggatgtggagacaaaggatttagacaggttcaggccctctcaatgagaggtaataccctactcctgtttggggatttgaatccgccgggtgtgtattgatctgacgatctagttgtctcatgcccctagaggggctccctgccctccttatataggacggggggcaggattacaagatagaaaccttaaccaatacggtatcggtttcctaaatctactttacaatcttatcaaaccaggactttaggccgtttcataatatacagggaaacgtaatacccaagtcatgatctgttacatattttatatatataagttatcccctataactagtcggataaccatgccgtgtgggtatggggtacccataatctccacagtagcccctgagaccttcacagtcggaaagataatcttctctcgaactagattactccaaagccgagtgcttcaatcatcttcgccatgatctcccgagtgctttttccaaaacagaagactgtggagggctgaaaaaataaagtcaggtgcatcgactagatgcaccgagtggtttcgataattgtagtcaaccaagcgacttaatattaatatgtagcatatgcggtgtgaatccctgaataatatgatccaagtgatataccgactgctttgtaaaatatgatgagtgtaacctaaagttggctacatcattgaaaattcacatagcaaaacagctataaagaagcttgtatgttgtgaataaagaaatttccaaagtattgagcatacgccatgcgcacactgctttaacagatgtgcttaagtccctagaagacacatggttccaccacacctggaaatatatggcatatgtggtataaaatccgagtaaataaactcataaaggatttaccaaccgcctgaaaaatgaccacaatatataatcagcctaagccataatattggtcaataaaaatgcacacttacgtggcaaaaagcaatgatattgtatccaatcaattgcttaaaaacccaaacagcaccatgactatataaaaaagtcagcgggccagctatataaagctttactgtttgacaccttttaagatgcattgtaccaactcctaaaaagtcgaataactgcggtataaaaggattttaaggtattgggcacttgatcacgcgcactttggcctaagcgaaaagtgcctaagtccctaaaagaacgtgacaggccacacctgaaaatatgggctgcagacatattaggcctaggccaaaaaatatgccttcgacaccctttaaaggatgacgcatgtaacatgcttccgagtaataaatcttccgggtaatatagaccaagtgtagctcatatgaatagcttctgatctgaatgattatcccttatgggatactccaaaataggtgtaacaattgaatcccgactggcgcaagtattcggttgatagcccttacggggaataataattggtccagtctttgagcatagaaaatagactcatgactatgaatccatgtggaatgtatccggaacaagtccaaattggagatataatcctcacgcttgagttgatgagcccctgagcatatagcttgtccttctgtcatagtcaaaattgtctattggcaatagctgacgcagtcggcatggagatgaaatgaccaacatgaagacgaaattgctcatcagaagtaacggaagatgtcagtggtagtaaagatgccaccaatcaaatgtaatgaagttgcataaccatggaggcgaagaaaccagtcggcaacagtcaggtcagctagcagtgaagatgtaggcgtccaacaacaacgaaagaacagtcggtggtgacaaaagcaaaccgacgatgaagacgtagacgcgcatcaacggtgatggcgaaatccaccaatcatgaagatgaagaaaataatcggcggcgacaaacgcatccgacggtaatgatgattagcggcaacagagatagccgactatgatgacgaagtttctcatcaacggcagcagagtaggctatgttgatgaggcttgacaagatgttgatgaagatgacgatgtcggtgatccagtcaatagcgatgtagcagccgatgataacgatgagatcctctatcggcagttgcgtagtaggccaaccgtgaagacaaataattggaggagagttgatgttgttgcccaactcgtctaaaccgaaatatttgaagttgttgaagtagaatgtctgctccgaatcaaagatgaagataatgactcctggagttgactcgttggttgatgaattgatttcttcagcttgacataaaatttgtcaaattttgagccttatatttgtgtagcccccgactctttggttagttgggaaacaactgaacatagagtcgagaattatagcttcttgtcgtcgagtagtcattgcttgattgaagatatgtgttgaagatgtccaagtagaaatcctgaatattggagagccacttgttgtagtaaaataacatggcattgcatgccgagatgtcgaggttcacaaagacgtcgtggttggtgaagtagtaaaacttgcgaagtagcaacaatagagtttcccggtgccgaagataataaagatgaagtcgccccaccatgatgacaaagttgtattgccgtaatgaagtgaacacaagtcggcggcaacagaagcaaaccggtagtgaagacgcgcagttgtgaagataaaagcaccagtcggcggcggcataatcagtcggcgacggaagatgatgatgtccatcagtagtggtagctgtataaaccagacgtagaggtaagggcactagtcagcaacagacgagacgaccggcgattaagatgtagatgcccaacaacggcggcataataagccagccgtgcatgcggaaactccagtcggcgacggacgaggcggccggtcggtgaagacgtagacgcccaacaacggcggcataataggccagcgtgcaggcggaaacaccagtcggcggcgatggaggcaggccggtggtggggtcgtagacgcccaacaacgacggcataataggccagccgtgcagacggagataccagtcggcggcggcgaaggcaagccggtcggtgaagacgtagacgcccatcaacggtggcataataggccagcgtgcaggcggaaacaccagtcggcggcgatggaggcaggccggtggtggagtcgtagacgcccaacaacgacggcataataggccagccgtgcagacggagacaccagtcggcggcggcgcaggcaagccggtcggtgaagacgtagacgcccatcaacggtggcataataggccagcgtgcaggcggaaacaccagtcggcggcggacgaggcggccggtcggtgaagacgtagacgcccaacaacggtggcataataggccagcgtgcaggcggaaacactagtcggcggcggacaaggcggccagtcggtgaagaggtagacgcccaacaacagcggcataataggccagccgtgcagacggagataccagtcggcggcggcgaaggcaagccggtcggtgaagacgtagacgcccatcaacggtggcataataggccagcgtgcaggcggaaacaccagtcggcggcgatggaggcaggccggtggtggagtcgtagacgcccaacaacgacggcataataggccagccatgcagacggagataccagtcggcggcggcgaaggcaagccggtcggtgaagaggtagacgcccaacaacagcggcataataggccagccgtgtaggcggtgacaccagtcggcggcggcgaaagcaaaccggcggtgaaaatgtagacgcctgacaacggtgttgtgaccaaccaaccgtataggcgaagacaccagtcggcggcgacgacggcgagccggtggtgatgttctgactgatccattcctggagcataagagataagcttaaagccatgaatcccttttatgcatatctggatttggatcctgcagaacaaacatataggatgagtagtttctgatgtaaatataatactcgagaaaaattcaagcagtttaaaatatttataaatatgtatttctcctcttgtcaattttgatttccccgagcagatgactctgtacgtttaaacactctgtccgactagtcataaccatcaagcaccgggagtcggcctaggcacttcccaaacatgcatatgagtgacatgagttcgtcattaatggaacaaagtttcacggatcagaatttactactcgggtacttttgcaattattaagagcagaaaataaatttatctcatctctatgctttagatttattccgaataatacttagcaccttgcgttactcggtccatccaacgagcccccgggtgctaggaatcggcccaaaggcaacgatccattggcaaaccaaacggaaagcataggaagatagaactccataactcgataggtacttttgtactcagattatgtcgcaagcaatcaagataaatattatgaaaaatatgatataacatctgtagcccccgactcactactcaatggaagaccaattggtgtagtgaggcagagggaaaggaaaaatatcatataaagaataaaataaatgatgacttagctttgtaatattccccttggtgatggcagaagtggccaatgtgggaacaaagtcgtccatcaataacaatgaagacaccagtcggcggcgacgaaggcggtcgacggtgaaagcgaagacgcccaacagcggcggcataataggccagccgtgtaggcggaggcaccagtcggcggcgacggaggcaggccggcggtgaagatgacgatgcccatcaacggtggtgtgaccaaccgaccgtataggcggggacaccagtcggcggcgacggaggcaggccggtggtgaagtcgtagacgcccaacagcggcggcataataggccagccgtgtaggcggaggcactagtcggcggcgacggaggcaggccggcggtgaagatgacgatgcccatcaacggtggtgtgaccaaccgaccgtataggcggggacaccagtcggcggcgacggaggcaggccgatggtgaagtcgtagacgcccaacagcggcggcataataggccagccgtgtaggcggaggcatggacgcccatgaacggtggtgtgaccaaccaaccgtataggcgaggacaccagtcggcggcgacggaggcaggccggcggtgaagtcgtagacgcccaacagcagcggcataataggctagccgtgtaggcagaaacaccagtcggcggcggcgaaggcaagccggtcggtgaagacgtggacgcccatgaacggtggtgtgaccaaccaaccgtataggcgaggacaccagtcggcggcgacggaggcaggccggcggtgaagtcgtagacgcccaacagcagcggcataataggccagccgtgtaggcggaggcatggacgcccatgaacggtggtgtgaccaaccaaccgtataggcgaggacaccagtcggcggcgacggaggcaggccggcggtgaagtcgtagacacccaacagcggcggtataataggccagccgtgcaggcggaggcaccactcggcggcgacggaggcaggccggtggtgaagtcgtagacgcccaacagcggcggcataataggccagccgtgtaggcggaggcaccactcggcggcaacggaggcgggccggcggtgaagtcgtagacgcccaacagcggcggcataataggccagccgtgtaggcggaggcaccactcggcggcgacggaggtaggccggcggtgaagtcgtagatgcccaacagcggcggcataatgggccagccgtgtaggcggaggcaccagtcggcggcgacggaggcaggccggcggtgaagtcgtagacgcccaacagcggcggcataataggccagccgtgtaggcggtggcaccactcggcggcaacggaggcaggccggcggtgaagtcgtagatgcccaacagcggcggcataataggctagccgtgtaggcggaggcaccagtcggcggcgacggaggcaggccggcggtgaagtcgtagacgcccaacagcggcggcataataggccagccgtgtaggcggaggcatggacgcccatgaacggtggtgtgaccaaccaaccgtataggcgaggacaccagtcagtggcggcagaggcagcgagcgatacttggtaatcttgatgcgagatgcatgtgcgtagatatagtccctgccttgaaatacaagatgaatcttggtgacttgggaaattcaaccattgccttcatggtcttggtgatgatgattttgctctgtatacgcttgacgctaaattgtagagtaatctttctgggcagagcagtattgatcgatgtgcatgcatagctgtatttaggccgacggcttcctctgattggtcggctggtttcccatgcacacagaaagtaccggattggcttatgtgcttgttacatgcaattgctaatgacgctggcccatgatgattgctccaatcgattggctgcgaggacaagttgactcggatttggattaataattggatctcgtcgggagatacgataccaacaagatgccggcgccacagatgccggcggctgagaattgatacgcatccctgaatagattaaaacagatgatgactgcggtgcggccaccttcttcaatgaaactgataaacatagcggcggccggacgagatcaaggtagtcttgaaccttcccgacttgattaggtccaagtgagaaatcgagagctttccgaagtcgtcgacgaagaaaccgaagcaggagattggttgtaaagcgacgacgaatccggcaatgctgaaggttagtttccatcgcacttgtcaatgggaaactcgacgcacccctacctggcgcgccaactgtcgaaacatgaattcggcaataataaaatggggtagcgcacgagacctaaaagtggatggatgtggagacaaaggatttagacaggttcaggccctctcaatgagaggtaataccctactcctgtttggggatttgaatccgccgggtgtgtattgatctgacgatctagttgtctcatgcccctagaggggctccctgccctccttatataggacggggggcaggattacaagatagaaaccttaaccaatacggtatcggtttcctaaatctactttacaatcttatcaaaccaggactttaggccgtttcataatatacagggaaacgtaatacccaagtcatgatctgttacatattttatatatataagttatcccctataactagtcggataaccatgccgtgtgggtatggggtacccataatctccacatcctcctcctcccacctctactccggccaccggccgcctcctcccacgctccccccgccgccgccgccgccgccgccgccgccatcgccacccgcctcctccttctagcagtagtaataaaggaaggaagaaaatccaccgccctacccctatctatccgttgcctcacgtccgtttcccacattttccgcttccttcgtccatcgccatctattaacccgcccccccacgattcctgccgagaaatttctcccccccacagagagggaggcgatccctagcctcgtcctgaatctcgcggcgccgccaattcgatctgcccgcgccgtctcagggcggcgaatcttgggctggagtcggggggagagatccgggatcttccttttcttgggtgttcccgggacgcaaatcttgcggccgccgggcaatgtgactggggttcttgtggggggtgaggcgattcgcgcgcgcattcggtgctgaatcttgcggggatggagcatgtgatcggggggaagtttaagctggggaggaagattgggagcggatcttttggggagctataccttggtacgttcctcgtggggttctcggatctctcgtctatcgccgctcgttgcgaggcaccgttcgtttttcttcttcttactgtttacgctgtttgtgatgatgtcgttgattcatggattgtttcgattacaggtgtgaatatacagagcagcgaggaggtagccatcaagttggtatgtgaagatgatttcgtttctgatatataagccttttcttacgccaatgtatatattgtagtaattagtattgcattggtttcttttgtgctgatgttgtgatgcgaatatggtttgttctgccctcctagaaaagattagatcacctgaggtgtaacagagtttgcattgctgcatgatcagaaatttgaatgaagctacatgtatacgtccttgtgaaatcgttgacatgacctcttgcttagtatcatactctttcatacaagtagaaaccaggtcttctaaatttttttggttctccgacctaactggtctattagagatgttcagaattgggaagtaagaaaaaagaggtgaagatttttcagcttccaattggatcgttgacattatttaattgcttcatctaggtgatgtgtgtggtttacgagagcacttattctgaaacatctgtaaataacatgaggcagcccaccaacccttgtcatactatattatctgctcttgtaacattaggactcagggcagccgcccgtgattctgttcacatcctgtaagacctgcaaacaaagcttttccgtctggggaaacgaagccttttggaataccttgtgcatgttttggctaggttgggtagctgtgaagcattggttattgtctatttcaatgtttcaaagcagcattcaaggattctcctgatattattgctccggttcagtggtcaatgcacttcttttagaagcttctattatttcgatatgattgttagtagtttggtcacatctacttttcaagcaacttaccttgtaagttcacgtagttgctagttttgtgaaccagctttgcctttctaatcatgaatgccatttctatattgtaagcctgtatgcattggattgctttcttaaatggtgcaatccttgttctatgagaaaatgttggtaataatgaaaataaggtgttcggaaacttggaaagtgtatttctatattgacatgaatagtcactgtcagcactgattacttgtccttgctgacactgggacaaattacctaaaccttttctgtcatctcttattttgttaggaatctgtaaaatcaaggcatcctcagcttcattatgagtcaaaactatacatgcttctgcaggggggaagtaagtgtaatacgggaaactgtttatctatttaaataaaattgttcacttattatgtcttggttatgttcagctggaattcctcatctgaagtggtttggagtggagggggagtacaatgtcatggttatcgatcttcttggtccaagtttagaggacttattcaactactgcaacagaaagttttctcttaaaacagtacttatgcttgctgatcagatggtgggtttttcttactgaattctattattttggctgttaattttggttacctgtatgactaaatttcaataaattaacgatcaaggaaagtaaatttcaagactttatttgtctgatttaaccactaacttcctgttctatacagatcaacagggtagagtacatgcacactagggggtttctacatcgtgatatcaagccagacaacttccttatgggtttaggccgcaaagcaagccaggtttgtcccattcatctgcagttgctggtagatataattcattatttttctgcgctttggatgttgttggttgcctggtctgtataattttgtattgataacatcttgattcgagtatttggcctggtttctaagtatcatcttttttggtgctatgaagttttgtcaattggcagtagtatcttcaattatactttctaagagaggctatgatattaccaacaacagctgtcagctgtgctctgtgtgcttgatgattatactagtttctttatggagaaattatcttgtataataaattttagtattttttagaaacatcttttttatgaatgtagaaagactttggagaatttaaactgctgactgtgatcatcgatttaccatacgttttattatttcgtaagaacttgaagaatacaaggataatatttctgttttctcttatttgtgcatactgttactcagcatatgcatatcaactgcctttctagtactgctgctaactgatgatcgaaagcctgcatttacttcatatgtgatatatcttacaatgaataacatcaagaaataagcacaactttttgtagacattgttgtgagtgatctttacaattctgtaacaggtttatgtcatcgactatggtcttgcaaagaaataccgggacctccaaactcataagcatataccttacaggtaattagaaattcttctctagtaaatgttttagaaagtatttatgtttacacctggaagattgttgtagtagagcactcagcttatgaaaaatcatactaaagtatattgttttggtagcaacaccgtttttatctgacagagctcaaagtgcttaatttagaatttttcattaccataactgtgcttggcacactaccggtggagcagtatctgctattaaccatattggcaagcagtatctgctattaactatatagataagcccacacaattttgttatctgtttttacttcttgaaattaagagaaatgcttgatagtagtgagtaatgacagcagcattgcaacaatttgatcaatgatgattgtgataattgataaaccattttctgttatgttttagtactatactgtgacattggtcagtaacacgggttacactatcactattcactacttagcagttacctccttcatactaatagtaaaaagtttaccagtttatctaccattatatttctatgcatgattatgcttcatacttttctggggatatatgtttgaagcttacatgtttttctttcctaccatagggagaacaaaaatctcacaggaacagcacgctatgctagtgtaaacacccatcttggagtaggtaagtgtctttacctgttactgattcgttttcatcagaagagattttattttttaaaaatctgaactaacgcaaactaatatgtatttaagaggtgcaaaatgtggcaacactgaaaagttatgaacaagtgtagctcctttgaaacaaataaagtttagcttgcaacaaaattagtcaattgcactctgactgctagtatatgcgttcttttaattctgtttttcactacagaacaaagcaggagagatgatttagagtctctgggctatgtgcttatgtatttcttaagaggaaggtgagacgatgcttgttttctattttttaaaattccattttatacgacaatacattttattgatctatgttaacttgtccatctcagccttccttggcaaggtctaaaagctggcacaaaaaaacagaaatatgacaaaattagtgaaaagaaaatgcttactccagttgaggtaatggaaattggtttccatgcaaaaaaaatctatgaagaagcatgacattttttgatttaattgcaacttaaccttatcatattttacacaattttgtataggttctctgtaaatcttatcccacagagttcatttcatacttccattactgtcgatctttgcgatttgaagataaaccagactacagctatttgaagagacttttccgagatctattcatccgtgaaggtatgctcaaatataatacaatgaagtatctctgcatacacatctaaaatgatttcctctcaattcttgcagggtaccagcttgattatatatttgattggacgaagcaaggttcagaaagtaacagattgcgagtatgtctgctattcctttttctaactttttttggtaatgcaaagctttaccgtactaaatgtgtagcatcttttccttgcttccagtcaagtggaaggacaagtgggttggtgggaccatctgcagaacggactgaacgagctgcaggtttgtcagtagcatagacattttttgaatttatatttaggaaataagtttggaaaataacaggggttttttggggtgttgtctcaacagcaagacaggatgttcctgacagattctctggtacagtcgatccatttgctagaagaactggctctggttctggccattacggagagcacacaaagcacagaaatatattggattcattacttgcacccaagacggtaagaaattgagcagctagatcaccttctagcagtatcctaaaaaaactgctcaaattagcaggataatgagacggatgtttcttcgttagtcttgaccatcttttcgcagaaatcttttgttgtgtttttacattacgttgctgttgatgatagctggaactctgtattctggaaggcttatgtcaattttaccatgcgtgctaggctgttgatttagataaaagaaggcccacatcatcatctcgtaatgggagcacatcaaggaaggctctcttgtcaagcagcagaccaagttctggagatcccattgatccgaaccgcagtaacctaattccaaccagcagtggcagcagtcgcccatcaactatgcagaggcttcaccagtcaacaggacttgagaccaggtcctcgcttaccaaaactgcaagaaatgtccatgatgatcccactttgaggacctttgaacgcctttcaatcagtgctgacagaaggaaataatgcttcgaagagcaaaagatgtgagttgctgctccagtgaggacactggggattccttcacacgatgattactgatcaacaagtaaaaaccattctgtgctacagatgatgctgagatatgcttaagagtgaagtttgcttactgaatcttggcgcaaaagaaatggttaaagaaatcattttacacgccattcagaagaacccggaccagcaactgtgctggtccaattaatgctgatgttgatcaaatatttgtagaaatgttattgaaataaagcagttcattactagcaaaatatgtactatcacgtagtatttcctttgtgcactgcaactagaacttctgccactctgccactatactcttaagataatcaatatccttttttgccttagtgccctttagatactccgtcacattatttccttaaaaacttggagatcatgtaatcgttattaatatatcatacgatcagatatcgttattcaactagcagttacttttctaactatcaaaatatttgtttcactttttgacaactgatttaactcaaatatgctctagcagtaggcaaatttgagtgaactgaatcttctttgttccaagaacatttgtgaatctgaggctattgccagtggtgaactactacggttgggttcagagctgttgtgttctgttgaatatttctcaataacctgtaataaagtactatgcacttacctcagctaggaatgcgtttgtttgtttgtttttttttgaaatatgcaaaatgcatatctttgtattaagataaaaaaaggctgttacaaccaggcacaactacatgtacaggaatgaagttgtacatgggtcctgatcattttttgctaggtaatgcccccagctgatgttgctgaagttgtgttagggcttcgtggttgatggaacattctttttttttttcgcgaacgcgcaaaagatggaacgttcttttatatcttaaaaaaaaaactccggcagtatataatcggaacagaatacagagcagtgagcagcactgccaacgaaactggaggcaacacaagaacaagtaccaatatgttagggttaatctgcacttgcaccttattgcaagaaatccatgtgactgggctgagcagttctctcttgactcgattaaagattacatgtgacgatgtttgtacctaattattttgtacaccaaagtttaaaccactgaatgcgctcagaaagcttatcaatatatggcagaacagataaggcccgccatgtatattgatcacagtaagggaacaagtagacactccctccgtctcataataagttaatttagtacgagatgtggcatatcctagtactacgattttggacaaagacatgtctagattcgtagttctaagatatgtcacgtcccgtaatagagtaacttattttctgacgaaggtagtatatgttaagaaaagcatatacatgcacataaattgctccagaataataagactaatggtaatacatcaattatagataatgaacattgaaaccaaaattctgcacatgcactttcctctgttattcagttatatcaaagcagagtttagcttcatcccagggaccattgatctcaaacttgtattcctgaattcttataagccagtaagggcaaacaattgagataaaaacaagcagtgccagcagtaggatgaagaacatgtgatgcaattggtatgtgacgcctagggtcatgatcatcagagcaaaggagaagagcagatgaagtctaagagagaacttcttaatacaaaacgcgacgaggggcacaaacaggaagatctgcaaggagaatagcatgattgcaaagacatgcagcctagatggcaggcgcgaagctacaaggacggatgctactatcgatgcattcaaggagatattgctggtcaattttgggttgttgagtgcaccaggtggccttatagttgaaccagaataatcatgcagaaagaggtgaaccaacagaaggcatacagcaagtgcccatatggaatctgaactgatggacctagtgagggtttgataaatcggtgccaaaacatacagaccactgatgaagaatgatgtattgaggacatacttggagagaagcttgagcgagaacggacttgccgtgagcaagagcatcgaaaacccggcaagaagtagactagtgtctagcttcaaaagagtgacctcatcaatgaccaagttcagtgtataggtccatgttgaaaccacaagagcaacaatgcagagatactgagatatggagaccgagtcgatcatcactttcaggaggtccctcttgacaacattggcgttcataaccatctcctcaaggaatgactcgtccgtgtggttatcgtcatagcctggctgccttcccccataggcaacttttctccactttggtcgactctcattgttcatattgtatttgctactatgttaacaaccaggggcggatccaacttgggaaacttttggggggaacaaacaaactgctacttgtattaaggttaaggctctgaaattaagagaagggcttcttccagatctagaagagaagctagggttaacaaacgcaagcgaattccagacaaaagtagtcccggtgggattgagagatgaatcagaaagaggatgtggatgctcaccaggatcccctcccatcccctgctctgctcgccagatggagaccgccgcccctcgcctgttgtgttcagccgctactcgtcttggcgcaaggagcggaggagacgacgagacgcgagattcctctttattttacgccaacggagcgaagggaagatacccgtgttacaggagatttctagctatgaggttttatcaaaaaaaaaaaaaaaagtaaatttcacaaaactacatgttttatggttcaagttacagaaaaccacaaatattgacacttggcacttaagtatatatatattttagtagtttagtttcacaaaactacactgtcgatgtatggattcaccttttgagatgacgtggtcgttccatctaggatgaggatgtggcaccctattaatttcgtgcgatggctggtaataggatgatatgtcctcgtcctagatgaaacagtcacatcatctcacgggtgaatccattcattgatagtgtggttttgtgaaacgacactacaaaaatatatatacttaagtgccaagtgtcaaaagtgtgtgtggttttctgcaacttggactacaaaacgtgtagttttgtgaaatttactaaaaaaaagtatttctaattatgtgggttaattgtctcaaaattcattctaatcaattttatactatgaaatatatacatatatgggttcattaaataagattattctggtcatttgtctatcctcctaagagcaagtttaatagtacagcccgctcttagctccaattcttccacatcatcatcatatagtataatttaagagacacatgatacaatagttgtgctctaataataagttgctgacacattatatatttattttaattaacggaaccatctatgtttatttatttatctctcttcctcgcgttgcgtggaccagcttcccctcgtgttgtatctgtgggcccaacttcttagagttcgtgagcagctcggcgactaaatagtcgcccactcaccttccttctttcctccagcgcatcacgcgagctaacgtggaaccattatcgccagcgttagggctctattgtacatgctctaaggctgagttcggtttgagtggtcgggaacaaatcttccgcgcacggaaaacggagcggtctattagtgcgtgattaagtaagtattagcttatttttttcaaagttggatcaatatgatttttttaagcaactttcgtacagaaacttggtagcaacgaacaaagcctaatatgttctaaattaactagaatttcgatttttatgggacagaggtagtatttgccaactcctggatctaagaaactgaaacgaattcgaatttttttctcggagacagaaacatatatgtttggaaaatttggaaacagaaaatttcatatatgtttcctaaaaacatatccgtcgaaaacgaatttggaaacatatatcccaaactatccgtttaggatatatgtttcctgaaactatccgtcaaaaacgaatttggaaaatttcaggaaatgaattcagatatttttctcggaaaacagaaacggatatgataatgctactatccgtcgaaaacgaatttggaaaatttcaggaaacggattcatatttttttctcggaatcggaaacgaagtgtttcacatgtgcaatttattagctccagacttttctactctaaatatttatatttatactatgtgccatagtaataacaattgcagttatagatgaatatagttctctttctccaagaaaataaagtgtacgactacttgtattattaatgataaaaactaaaaatattgatttattgtttcagaaaagatatcgagctacatctcttcattgattttagaagttcggcttaaggggtttttatattccgataaataagtgttaccgtattcgataatattcgattttgtttatgtatccgtgtttctgattccattccaattttgaaaagaatatggaaacggaaacgataagtggttttcgtccgtttccaaagtgttttcatccatacttactctacctttatctcaatttttttactactttaaaactaactatttctttatgatgactgatggtccacatgccactttatccatgagccaccatcgttcctcctctccgcctttatatgcacaaccagatgtcttttttccttgtcttttttccttccccgtcatcatacacgctattgtgtcatcggacttgggaggcagaagccgatccgatgaagagctagatcaggcggctccttcttattggatccgatgagagttagtgtgcgaaatggttgtatagtgactgaacttagagatggatagaattgggtttctagtcagcaacacgggttaggtgttgttgaaggcggctcaaagatgatctagatagaattcgcatggatgaggtgagatttttttgttttgtagacagtctctttttaaaatgtctcaaacataaattacttggtttcgtagacagtctctttttaaaatgtctcaaaacataattacatgcagtccatccatttataaaccaaattatacaactatgacatacaatcaaattcagacccaaatgaacaaaacattaaattttatcctaccagtccagactgggtatattgctgttttaattttccaactactgaaaatgagagaaaaaattgctaactcagaaaatggaaggattttccatctaactcaggaaatggaacgattttccattcttcaatgtagaagcacgcctaccatttgaaaaattgaaacagatagcgtctgccattcggcacgactgagcaagtgaatattccagtctcagtaggtggtgtaacattcaataacccggtgcagcgactcaagactgcaatatgctgcacgagcaaaacacggcaatctcaactggtaacgagtagagtccacacaaatcaccagtgatcatatgttggaaactatttaacagccatcagtcatacaaaatctctaaagcacaaccatgctcaatttaaatatgaaataggttccattaaacagtagtactaattctggctctaagaccattgaaacatattgctgatccaacttggaaccaaaaactcaacatggcactactaagccgcggcagtcttcttgagcttcgcaagctcttgcctgatagcacctcccctctgttcatacagaaaacattggtgtaagctagtgagtagttataaacaggagtaaaccaattgagaataggatgtctgaccttgatcttggccaacataaccttgaacctgtcaaagtcattgagtgacgctctcctcttctggacaattagcttcttgccccatgagctattctcccacttgttcttaacatcttaaatagaataaccaccactcagattagacatggacagaaataaataactgctgataggattggtagcacaacattcatactaaccagcctcctccatagccttaatcaaagttgtcttcttcgggacacgtttgatgtcaatcttgatgtcagtcagggaaagcctcttgaagttgatctggcacctgaccatgtcaggagcatccacaagtgcctggtgattcacagaaaacagagttatgtgatatccaataatcaaagcactacaatataattaactccgattagaaaaatgagcagcgataacataatagtggcactaatgcatccgccaatggaggcaccatcaacactatcaatcataggtaaaccaaaacctcattgtcaataaatagttcattattgtaaattgccaagtagtccgagctaatgctgataaacttctagacttgacgcacattttttcagatcaagtactccctccgtactcgtaaaggaagtcatttaggacagcgacacggtctccaaaacacaactttgactacttgtttctataaaaatatttattgaaaagtgatatatgtatacttttatgaaaatatttttcaagacaaatctattcatataatttttacatcttcaaactcaacaacttgagagttattcatgatttatattcccgaggtttgacttaaacattgtcctaaacgacttcctttacgagtacggagggagtacaccacagcaaatgcagaatattcttccatttaaggctgtgcggaaacagaagagacttgctactctcaaaggattcatttttggcgttccattatattctactacgttaacaattcttacatttctcactagaaacaaattacaatagcagcaagagtttatcacaccagctagtactagtataatttctatagatccaaattataaagcgggtacaaatggaaacagttcaaggcgtacgagagaagacgatgcttacccggttctggtcgacgacatcaacgatgacgacgaggcggccgtagtccttgccgtagttcaccagggccacccgcccgatctccacgaacctcttgaacggctgcacgaaaggcacaaaaaaaccccggtcaaacacacgcgcgcaatccaaagcaccaccaccaccaccaccaccggaacggcaacggcggcaagacgacgagcccacggcgatccacctaccattctcgcggcggcggtcgggagaagcggcggggggggggggcgcggagaagcggaaaggcaaagaggaactagggttcggcggcggcggtggtgggagtggcctataaaggcagcgcgcgggtttccctgagccggtggatcgccacccgaggccatccagccgtccgatctagggtcagaccgtcagagcgtttattctgcgggggaccttactgggcctccctgtttgggccctttcaacgcgtaatgggccggcccatttccgagctactcagatcaggacttgtgttacggcctcgccacaaggatcggtgcacagtaagattccgcggtaataataataaatctgtacggagtcgctggcctcgcctcgcctcggcatcttctactgctcgccatcgcactccacctcgggtgaaagccggcgccttttggatcacccctctcctccgatcgaccgggtctctgctgaggtctccacgccgccgacaggtagcgcgaggtaagggggaaaaatattggcttcttggtcaccggtttggatgtggccagtgtgtggatttcgtgatcagtgggtgtttcttgggtcctgggatctaagctcggaagattagtagaaagtgctttccacttcttggattagcggttcgggggtggcctggtggctctgatctgatccagggtcgagttgtttctgctgagtggtagaaagtctagaagaaatcttgttgctcggttagtttgtttggtgtgatgcgtagtggatagcacgggctaattgcttgttgttgatgtccctgatctgtgttttggtacaggtacttagcagttagcacaactgatcctgcaactgaaagcagttgctgattggggaattcattgccacgggtcatagtgattagaaactgttgtgggatcagtgtctctttagtgaattagtgtggatttttgtttgctacggccgatatgttgacgcattcattgttttctattgcagctagagagatggccgagacagtgttcactccctcgttggagggtatgaagcatgttaagtcagagagcagtgtcatactcaccaagccctttcttgatgtctgcaagcaaatcttgcctgttttgggtaactgtctttgatttccatattcagatcagtagcttggttccttttttaatttgtatttactatgtttagttcagtactgcggtggagcagtaaatggttttctaagttgagacaagcttttggcaattggcagtggtctatactgttgttggattttgcctatcaaaatcaccaaatagttatgttggtttgtgggcatttggcatttgatttacctgtaatgctgctacaaatagttgattggaccaatccatcacctcggtagaattggtcagtgaccttctgagggtaacaccatatgatatttaatgtaggagttcagtaaagttttttttgggggtttagaacttagttgttgctatatacacatttctaaacaatataagttttgacatacatttgtgtggttgtgttagtacttcaattaaatcgtttgttagttttaagtcagggcatactctaactattgtggctaagtgttcctttgtctcctttgttctctgactttgtattccagataaatttggagctgctatggcacttgtgaagagtgacattggtggtaatatcacggtaagcatcctttttctgcatgacactgttaataatacattgtgtttcattcctcattttcattagtaaatttctagtgttatctatgtgatagatgcataaatcatatttactttagaatgatttgcttacttagaagtgtccatatcccttttggagcccacagatttctagtttgttttgctaacaactgatctaattcattcttcagaggctggaaaataaatattcttcagacccatcaaaatatgagcaattgtacagcatggttcaggaagaggttcaaaacaagactgcaaaaggttcgtcaagctgcacaaatggacttctgtggctcacgaggtgcttcaaaccttcttggataatttatcacctttcagttgcagcttaagcagccttattaactcaaaattttactttcagggctatggacttccttgttgaattattccgtaacctgcttgagcatcaagactggactatgagtcaagcttgtactgattcatataccaaaactctgaagaaatggcatggttggcttgccagttctagttttacagttgagtcgttctctctatgttgacccgcataatcagcatatacatggtgttactataatctcttcaacattattattttagtgaaattagaatgtttacgcctaaataaactaatgcaagggtggttccttctcaagaacttcactaaaaagacaatttttctgttttagcaatctttagaactagtggaaaatcattatttttctttctcgaatacagtggagaatcattataacccaactgttttcagtcatatatgctcttttagtgaatacgtacaagagcacttcagttcataattgggtgagagaagggctttgcctttctgtgagaagttctttaatttggtcatgtttgcttcctttatttgcttttcctccgtttgtatgagtgctcatatgagaaattggcaggtggcaatgaagcttgctcctaatagagagaaatttatggaggtcattagtggaacgggtgacataaaagctgatatcgagaaattctgcacgaccttttacccttttctcaaagagaatcatgattttctggtatggcctctcacattttgaaggcttagtcctttagtctgtaattgtctgattctaatgtgatgtcttccatcatactattcttgcaggccagtgttggacttgatgatctgaaggcttcttaatgcattcctatgcaacaattacccacagaataaacctgtcttacctgtctaatgaaatttagtgctgccgagggtatgctgttttccacctatctttggaaaactatagggcaataatgaatgtcgtgagctcagaacgattgggcaagcccatgggcagctatacacaatgtatgtgttgctttatgcaaaaaggtcaactgttgaaaagcattcccgtgctagaggaagttaacatgttacgtacttatatgccctgagaattgttcatctggggtatccatcagatttggtatttgctgaggccttaactcgacttgcactggaaactgtccactctctgggccttgctggagtgcgaagcccaaacgttctgatgctaccgattcgcgtcaaaataagccatttgttgcggaaacatttgtgaacaagtcaatgataaactctccacgttcggaatcaatttttcggtcggcaacatggcactggcagtttcaacactggagaagatcaatccatgtgacgtgttaacacatattttctccatcttttagttaagtccatcaatgcacggatggagcgttcataggtgatatagacgcaattcttgaaacacgcatgatgtgctactgaatatgattaactagaccaattcggttgcacgtacgcctcctcacctgaccatgtagcgaactaaacaaaaacatttccgaagaaaatatttataatcgaattgctccacgctacaggagttcatcataagagaacttcgtaccgttcacaacggtaccagtcattagaatatttacacctaaatttccattacaaattgggacgagccatactaccctagaacaatcactaggccaaacgtgacaagcgcaccgccgggcgctgaaggctttaacgtcgtttattgcaggagcaacaaaggactcatgtgcaacatgacactagggatcactctctagagagtgaatttacttcacttgtgtagaatgctttttttctgcgctttgaacttcttctgtggttgagtctgcacgcataaaacaaatcagttaaatgaacacttctgcaagagaaagaggaagtcttacaagataacaatgggaaccaaccttcggcttctgtaatgcctcgtagtcgattctgttcttccatgtgctcttgcgtagtttgattggcctgtttccaacatatttacctgcatgatgttagatgtgttaatcatatctgcagtgcgacgataatccaggcaaatggtgacagggaatgggggcatgaacttataccattcatctctttcaatgctgcagcaagatccgacgcattagcaaaactaacaaaggcatagcccctagttttaccagtccatttgtccctaataacctgaagcagaagacgtccattattaacagtcatcttgaagcagcaaaaaggtattataatgaagaatctaaaagcttgccatgctatatacggtgtgactcaccctagccatgttgaaggatggatattttgaaaatgcctttgtaagaacatcatcgttcacttcgtttccaagatcgccacaaaacaaccgaaaatcatctgtggatggggaaaatttgtcagatgtaagtgtgaatgctttgaaataaaaagagggcacatttgagaaaaacaactgttatagcaccatttttggtcattgctacagactaaagtagaataatatatttgcttctatcaaattatgacgaaacatgacagcacaaatacatactcatgtcaggtgctagtaaattccaaagacaatatagcatcataagtatttaacgctgccaacattgcatgctgctgctaaattattatacatcaactcagcaaggctgctacatcttagacatgttacatgatggatgacacatcatgaagtattacaactaaatagtggtatctgatacgtcagctaagcatgtaaaactagaaaactgtagctaaaaatgctaaatacagttaatatatttaattgtacaaaaatctaaaaataaggatgacaaacaatctgcaagagctgagctacagtacatgttatattgactaacaggaacgcaacatgacgaattgataaaatcagattattgtggaaagtaagttgattggctaaaagcctcatcctttatgcaatcactaatatatggaacaaaactttttaataatgttcatgctttgttgataacaatatatataagggaagatctttatttggacagtccccaacaagaatctatcaccatattaatcctaggatggtaagtgtatcatcaaaattacaccaggaacattagaataaaaaatataagtggaatagtttgcaccaaaatgcgcagtagaacatatttctctgtataactctatgaaaaattttcaaatatcatattcatataatcaaattaggcatgcaaaaacgagatgacaatgcatgtaaactaatggcaaaggcacaggaaatgtttactatatcatctgcaaagcccacctaattccacgagacaggcatcaactctgaaacctgttgggctacatatcacatcctcggccacctttaacagaaggaaacaggggaaagtttgtcttattagaatacatagatcgaacattagatcttgcctggggaattgaaggtgtttgatggtttgttgacgtgaggataacagacattcagacaagttcagacgaggggaaagtcacactgccaagttcaagattttatagatcatagaaccacaacattccaacacaaccaccaggaagaaatagtgagaaagagatcttactttcgggccagtcagccaaagttggatcctcccaagattgcccagctgcctttcgaggtactgcctttttgtttgcttcaatcttcttgtctttctcactatttgcaatagcagctttcacagtagctagagcttcaggagtgattatctgtgaatctttctggaacagttgctgaacctgcgtcgtggtgataccataatagactagttacagctagtttccaaaataaaaattagtactatcaggttcttgatttatgaagctacatccttttccatttacactgaaatacaacttacagttgcactgaacaagtctctcatcaaatgttaataattcagagttagaaaacataaacattggcacgcctccctacatctatagaaatgaaatcatgacgtagcatctaagatcttgcataacatgagccgaatatgtagatttctgtgcatcattctgcagacagatttcacaacctacaaactgtatatgatacactggtatagtgcaatatgaattggcttccattgagtattccacttttacattgtgttgtcccaaggatgaaaggtggatgacgaaagaccaaatgagcctttcagttgaatcaaacatgacatagcgcattatccccaaactggcattactccaagcctctaaaacaacagagtctagatcctccctaatccgccatcaccgcatcaacaaacgggcagtagaattcacacagaaaggagcggttgaaaacgtaatcagaagaagaggggcagagttcctacctgctggacttggggcatggggtagacggcgttgtacgccgcgggcgccgctggccaggtggcgggctgctgcacgttctggaggtggaacgggacggggaagtaggacgggaccgccgccgccgcggcagccgggtacgagtactgcgcggacgcggccgccgcggcgggcgagatggactgcgtcgacatcgccggcgaggcaaccaaccagagtgcggaggcgcggcgcgggagggggcgatcgtacgggctcacgcggcgtcgcgtgcgatgtgtttgttgatctcaacggcccgcgcgtctggtcgcggattgcaggtggcgtgagcgcgaatcggttgggttgccgggggaagcagaggctgtgtattgtgatgatgcgccgcgtggtggtaggggggaatggtgtggaattctctcgaagctcctgggcgttactggcgatcacaccacacggaggaggaggtccacggggagatccgcggaaaccggccgcgatttggcttacgggcgctagcttaggcccaggaaggaggggaatacgtgggctagccacgggaaggcccccccgtgaggccgtggcccgtgtatgtgatgcggcgcgcggcctcctcgcgctgcgcagtgcgtgtgcgtggacgttgagccgtggactggagatgaggcgtccccaccgggcaacacgcggcagctgggcggggtcgggtcgggtcgggtccggccacgcacggaggcgaggcggacaggcggttgtcggatcacgcagacggagggacagcgccgcagcccgcagttatttgacacggttcgggcggacgcttggagaggccgaagtagcagtagcccggcatcgcgcggaggcggagcaaacaccgcgcgaaggtgacgtcgcggcccgacagtgtgtcgaggcttgctgattgtccatgattactttttctatttcctttgtcattttgtcattttgtgatagagtatggtggtgttattttttcatgaagatgaagattaagttttttctgcaaaacgagatggtattaacgcatgattgattgagttttcattattacaaacttcaaaaatagattaatatgttattttagagcaactttcatatagaaagtttttacacgaaatgcacgatttagcagtttaaaaaacgtaccacgaaaatcttaattttcatccaactcctattggagaaaagaacagggcctatttcttttagtcgtgaaagcctgtttttgagtctttggtaccaacatatgaaatatttatgataccataataatatttatcactaaaccaataatacttgatgataccaatgataatttgagttaccatatcatggtatctcgaggtgtcgtaccagtccataatatatcgatctatcattctgtatcgtatagtactatataatatcatatcatggtaccttgagatatcatgatattgatttattatattggtataatgtaatacttgatactatgtcgtgatatctctggatagtacgcttgatgatactcaatgattcttgttgatatacacgcgataaaatacttgatgatattcaatgatattggtccatacatacttgatgatacttatcaatatacgatgatactcaacgataatcatgggttttaaaaatgatcgatattgatgtagtatcacgaaggtaaaatcgagttacttcatgcatggtatcatgacatccttagaataaatctcggtattagaggggtattttatttttttcaaggatcaactccctccatttgcatcggccaattagccgcattctagttaatttgcaaccttagaacttagaagaacaacacacacatgtatagacatccacgtcaaagctagcgccgccgacgacgcacgtatagtatttggccggttacattccgctgttttctccagcagacaaaacaattattgcattgcattggtacgtctcttcaattccattcaaaaaattattgcattgcaatattggcctcttccagagagagaggctcaagtcccatcaaaacagaagcaagctaacgatcgagcgagatcaacttggcaaagcgagaatcttgcgagttgggtgccggctttggaggcatcgctacgcacaacccctgtggattccattgcccccactaatgatctctcacaacggttttaaaattgttcagggtacatgcctgcaaattaattaagcgatcagagctaagctagctagctacatctggcttatgcatgcacttggagtacacacgtatattaattaagcatgcctggattatggagtattcgcggctagctcacatgcatacatgcatggggtttaattaggagcaacatttggcaggaatcaagtacgcctagtgcagagtgttaagttttctctaacttcttttggcgtcaggcgtacaaccctaattaaagtataccatccctctattttcataatataaattttgtttggaattatcttaagtcaaatttgtttacatttgactaagtttatttgactaagtttatagaaaagtacaacaatgtttattttcattgcaaaacaaacaaacttttaaaaagtatattaaaatgagtcaacatatgtagcaaccatctaaccatgtgctttcagctaggaacgtacgtccttgttctccaaaagttaatccaaatcggcaatgggcccttaatcgcacggacccttgcatgcatgggccgttctgttgcagccgcgcgccttgccaaccgcgcaggttcaccgcccctgccagcaccctgcaacattccattgagagtgattttatactgttttcaattcaaatgatggtacatcatcctcaatgacaataaatttttcttcaatttaaggtagaaaaggtggaggaagaaagcattcgtttagaccaaaccggcacatcaatgtatgtatgttttgcattatcaccagctacacgcatttacgactaattaattttttaagtgataaatgatatatccgtcgacagcaaggtttctagatgtttatggtgacttcggccctgtttacatcccgtaccaaaactttacaccctatcacatcgaacatttaaacacctacatgaagtattaaatatagactaaaaaataactaattgcttagattatgattaatttgcgagacgaatattttaagcctaattgctccattgtttgacagtgtgttgctacagtaaacatttacaaatgatggattaattaggcttaataaattcgtctcgtggtttactgacggattctgtaattagtttttttattagtacttaaacacgccatacgacaccctatataatatctgatgtgatacgctaaaactttacacccctaaatctaaacaccccctttgtgaatctccacatagatagtacttgtagggccactaaaccctttttcccatctttttcagcgggatagctacttttgcatccggccaatttccttgatcaagtggggcggaaggtgtccagtttttatagccaggcagatcccttcccgtgaatacaattgcctccttggtgtcccatgatcgcccaacttggtggatcacaagtacatttggtatatatctaaatcaaatcacatcgtgacgacgaatttatatttcaatattgcacatttgcatcaatacttgagtatacacaaccaatacattctccaatacaggtgataactaataataaatacaactaatagctaataattagcaagacaaaattatgtggcttttagcacgacacaaacgcaaacccgtctagctagctagctggttaattattattgacgtgttctttttttttatttggtttaaaatcgatcgaagattcgaagggtaacactcacatttcggcgatttcgccatagcccccagcccctgtcgctagctttaatttccctctcatcgtccctatacgcatcgcgcggtttgcaattttgcatcgatctatgacgatgacctcaatgacaacacatacagtacacagtagcagatcggcgacgtccgtactaccgatccttggccacacaataaatggtggtactacacgaatgttgcttccagatgcacggttggatgtttcgttaacaaattaatatggttgcttcaatcgttattagacagctacagctttgtataaagttcatgtccatatgtgcatgctggcttaattagttgcagctagtaggtctggagtctgtgagagaactccatctgttctgtttgcattgactataatacaaaaacggatcagcaatgatctaattaattatctaacaagaaatagttggttagtgtattttcccccgtgcaataatcgaccaattttgcagagctaaattgtaaaagtaaaataggatattatatataccagtactctctctccttaactcatagacattttgatcattgtacgcagaacaagccaacaatttagttgaagatttgcgatgaaataggcggtgacaaatatccagagtaggggcaaagttgtaattttactaacgaaagtcgtggtgacgagtattttaaaataaatgattttgtcaaagttgataattattcaaaaaacggatggtgtattagttgttatttacataattgtatcttgtatatttataatggacttagaaagtataataattacattatttgatatacaacctcttatcttcagatttcacagacacaattttgtatgcaacattttaacaatctaacacgatgattaagtggtggaaatattttatttttttccctaattgatgtggtaatttttttctagacctcctgaatggatgtgatggctttttttgtctaaccaagctcatgctttcaaaagctttaaccaaattaatacgagaacctaattaaagcttaccctgtcatggaattgtttatttgcctgaatggatgtgatatactctcattattgtcagtaggtcctagaacgaacagacaatgattagtttagtttactatactggtactgtataaattaataaattaattagtatatgtattaaacattgtgaaatgacacattaattcctacatacagttttttagataagcatatatctatctatctatctattatattattaaaacagccttgaaagaagacaccacgttcgctgtggaggctagaaattctcatattaatcggagaaaatatgaattatttacaccgttagattgttaggtctatattttaacatatgagatttaacataaatccggcatgttaaagtaagagataaggagcaccgtacacgtgctgaattagaatcaatctcaaactaggaccaaacatgcaaacggactcaacagagttgtccgatttccgaaactaaacagatttaggacctagatgaattaggcaataaatgaagcagcaagcaacaaagcactgcatagccctattttagacgtgttttgttgatctgaagatagatactagtaggtagcgacggaaatccgcagcagcaggtcaagccgtgcggctgcgcgatgagtcggactcggtgatgcacgtcagcaaccagaaggcacgatagcatgtgcacgacagcaagataggtgcataccctaagcaatacaattaaaaagtttttctttgaaaatatagattccaaaataaacgtaaaaataacatttggagtaaaaacataataccaacaataaatatgtaaattgtcttttccagatattccttttatctatgtatattattaagataacttagaaaatcatcatagtcgttctagaggggtacaaatctttattattaagacaacggcttagtcgtcctatatttttttctattataagttatcatagcaatcgaagaaaaaatctaagctgttagattgtggtagaaccaattatacggtgaagattgataacataaatgttaataaacgcaatacaattgaattttttgaattaaacaaaggtatataaaatacaataacatgcaagccactgctccaccgtcagcaccttgcagcttattaccagaccaaattaagcgcatagtagtagcacatattgagaacctagaacatctttacgcatataagtcatatattactatgttaaaaaggttatatactattagtgaaatcattctatcaattaacgggtgattaacaatgaggcatatatataacgccacatgccttaaaaaaaagaaatatatattgtctgatcaacgtgggacctaatattgtaatggccaacattcactcaagaggctagaaattctcacattaatcactaatcagagaaaaaagaaatatgatattttaattagaaatataatttataaataattaaaataaaacataaaaaaattaaaagagtcaccatgttcactatgaaggctagaaatttccacattaattgaagaaaaaaaagagttcgagtggaaatatattttagaaataattgaaaatcgaaataaaaataaaaaattgaaagaagagtccatgtagaacacaattaaagattaattaaaatatgtacaaaaataaaattaattccaaaattagaaaatcagaaataagagttaaattaagaataatttttacaaactactaaaactgggaataaaaataaggaatattaaaacagtaattcatatataacacaatatgagattaatagaaaaattaaaataagattttaattagaaatataatttataaataacccaatttcgaaataaaacataaaaactagctattgaaagagaagatcatctaaaacccatcacgagataaattaaaattcaaaataaaaataaaataaattcgtaaaatataaaataattataagagttcaagtacgaatacaatttataaataacaaaacatcggaatgaaaaatattgaatttttttaaaaaaacaaatccatctagaatacaatgacgataaatgataataaaaaggggaaaacaacatgtccgtaaacaagtagagcggtgacggttgatgggtcatctaaaaactataaacaaaatctcaaatagaatccaacgacgattaagatgagggacagcgggcgggtcgttaaatagcattgttacggcagttggtgagacttctgaaaagtaaaagagtaaacctcaatgataattatgttcgatttttaaaatctaaatgacaataaagaagggaggcagcgggcaagtcgtagaggagtacagtgacggagccgacgacggtttgattggacttctagacagtaaaaacatgaaccccaatcataattacatttgatttttaaaatcccaatgacaacgaagagaggaggcagcgggtaggttgtagagaagtaagggggcaaagccgctggcggtttggtgggacttctagaaagtaaaaaattgaacccgaacaatagttttgtttgattttgaaaatcacaatgacaataaaaagaggagacagtggatgagacatctaaaaattataaaaatgaaatccgattagacaataaattttaaaaactacaaggtctaatttttaaacattctaaggagaatgaatagaagaagtggtacatcgaggggtgcctaagaaataaggggtagcaactagcatggcttttaaaaactataaaattagaaacacgtggatgataaggtttaacctttcaaagtcttgatacaacaagatagctatttaacaattttttagtaaattcatattaaataatagataattttatatgagtgctagccgtgcaattgcgcgggccacgcagctagttccaatataaagtatacatctatgttactccgcatgcctctaatcattgagcatttcagttaaaattcacatcaaaattttagtagaaatttcactactaaagtacagcctatcaatgccacctctatcaagtgttggttggattaaacctgacactggtaaggattctgccccctcctcctggaacccatgcatgatctgaaggacaaataaccggtactgattacgacagtatcgatcggaagaaaaaccagtaggcactaatgtgatcagtgtcagtttatttaaaaacccaacactgatgaactaatttattagcactagtttgcaagtagtgcaggtttatttaaaaacctaccggcactgatgggccaaacattaatgccggttagggagaaaaatggcaccaatgacaggagcccttcagcccgtaggccaacttaaaaaatattattaaagtagacgtctcacactctaggacactactttccaagtaaacccctccctcgcgctctccctctcagcctctttctttgacggcgacgacagcgtgatcctcctccctaccgtctcgcagctacctagaaattgggtgccatagcggttgcctggagcgtgatccttctccctccctattgacaaggccctcgcactagtacagatccttccatctgtgacggcccataacaaaactggaatttgcgggccgtcacaaggaagtaatctcaatcgggccgaagtttcgcccgattgagatatggtcgcataaccatggtatatcggcataaaactaaagcccgtcacggatgacacttatctgtgacgggctatagttgaggcccgattgagatgagggttccatatctcaatcgggccctaaaagaagtccgtcacagatgagggtcatctgtgacgggctccaactagaggcccgattgagataagtttaatgcccgtcacagatgacactcttttttgacgggcttttattaaggcccgatagagattacttgtatgcccgtcacggttgattgttttagggccgttacagatatttgttgcacagtataaatacccaccaccacctagtgtaaatgtatcccactgttcactattttggtgggaggctgtagagggcgatttttttgtcctttttccaaggaaaatagaaattaaattcccaaaagtgatcaaaatggatcaatcaagtgagtaatattattcattaattgagcaatttcatcacgtcttacttttgcaatactgatcttataatatgtgcctctaatttgtttttttttattttgtagcaattgatcgaagttggatgtatgcgaaaaatttgaaacgtcattctacggagtacagaaagggcgtaataaattttatgaacgccgcggaggaggatcggaaaagaggaaacagtgattacatgtgttgtccatgtgcagattgcaagaatgagaatatgtttgatagcggagaggacgtacatggtcatctgatacaacgaggattcatggagggctatacatgttgggtgaagcatggagagcaagaatcaggaagtggagcagtagcagacagaagtggtgcgcataatcaggaagatgaagatgagcatgacatgtttgtaccttctccattgatgtgtatcacgatctgctgcaagacatgttacatgacgttgaggacctagcccagaatgagagagatggaatgaagttcagcaggttggtctgtgattccgagacgcctctgtacgctggatgcaaagcaaaacacactaagttgtcagttaccttggacctaatgaagctgaaggaaagtagtggatggacagacaagagtttcacaggtcttttaggaattttgaaggctatgcttcttgctgagaacacattgcccgagacgacatacgaagcaaagcaggttatgtgtccactggggttagaggtccgtagaatttacgcttgtccaaacgactgcatattgtaccacaagcaatatgcggacttggatacttgtcctgtctgcaaggcttctcgatacaagcgaaagaaaagtgctgacgaaggaaataagtcaaagaggggtggtccggcaaaggttgtgtggtatctacctatcattgatcgtttcaagagaatctttgccaacccgaacgaagccaagttagtacgttggcacgccacgaagagaaggaatgacggtatgcttagacacccagcagattcgattgaatggaggaatatcgatcgaaaacacaaagactttgctgccgaccctagaaacatgaggatatgtctgtgtacggatggcatgaatcctttcggtgacatgagtagtactcacagaacttggccaattcttattgcgaactataacctcccgccatggttatgctttaaacggaaatatattatgttgtgcttgttaatccaaggtccgaggcaacccgacaatgatatcgatgtattcctggagcctgttatcgatgatctggagattctttggaaagaaggtttggaaacgtgggatgcatatggtcaggagaacttcaagctaagagttctattgtactgcaccattaatgactaccctgcacttggtaatctttccagacaaactataaaaggaaagaaggcatgctccgattgcaaggaacatacacgaagtcggtggctgaagaaatcacgaaagatggtatacatgggtcatcggaggtggctcccgctacgtcacgcatttagaagaaagaagaaaatttttaacggtaagagagaacttcagcctgctcccaaagatttgtccgaagatgaggtccacaatatggtcaaggacataagcaatgagtttgggaagaaaagaaaacgtagcaagacaaaggagaagggtatgtggaagaaaaaatccatattttgtcggctaccttactagaaagatcttgatgtccatcattgcattgatctcatgcatgtagaaaagaatgtgtgtgagagtttggttggcctgatgttgaatattcccgggaagacaaaggacgggttgaacgcgcgccttgatctacatgacatgaatattcgcagtgaactccagcccatacgagatgcagagacaggtagagtgtacctccctccagcctgccatacattgtcgaaggatgagaagatcgcaatgttaacatgcttgaaggatattaaagttccatcgggctattcagcgaggataagtaagtatgttaaattggaccttctaaaacttgttggaatgaagtctcacgattgccacgtgctaatcacacaaatcttgctagttgctatcagaggcattctaccaccgaaaatgcgtcacacgatctaacgtctgtgcgccttcttcaatgcaattggatagaaggttatagatccagaagatctagatgggttgcagacctatattgtgaataccctctgtcacctggagatgtttttcccactgtctttctttgatataatggttcatctccttgttcatctggtgaagcaaacaaaactatgtggcccggcttttctaagggaaatgtggtcgtttgaaaggtacatgggagttctgaagtcgtacgttcataacagagctaaacccgaggggagcatcattgaaggttacacgaccgaggaggctattgagttctgtgtcaattacatgtccgatgccgatcctatcggagttcctgcgtctcgtcacgagggaaggttgtcaggtgttggcacaatcggaaggaaaagaattaggcccgatcaagcgtcgtacgcgcaggctcattacgctgtgctccaacatatggcagaagttggcccatactttgaggagcacttagcgaaaatccgagatgagaacttggggcgatctgatgcatggattaacagagaacataattctcggttcaacgaatggttcaagaatcgtgtgacaatgtccacagatgtcccaaatgagacagtacagttgttggggatgggaccgtcttggaccgtagacacatggcaaggatacgatataaatggatacacattttacaccgtcaaacaagatgacaaaagcacagtgcaaaacagtagcgtccgtatagatgcattccagaatcaagttggatcaaacacatactacggccgcattgaggagatatgggagctaaactacgtcaagttcaaggttcctttgttccgctgccgttgggtgaatctacgcactggtgtcaaagccgacaaggaaggtttcactttagtatatctatcaaaggtgggatacgccgatgaaccatttgtacttgcgaaacaggtcgagcagatattctacataaaagacccttcaaacaagaagatgcacatcgtgagggatggaaagcgccgaattgtaggagttgacaacgtcgtcgatgaagaagaatacaaccataatattcatgtaagacctcacattgaccttgacgatgatccccaagagcctgtggcatatgctcattcagatcatacggaaggcataaccttgtgaccgatgcatttgtacttatctattgtaatgaatgaagtattttgttttattgcaaagacttgatatgtgtagtcattaatatggctaattttgttttattacaaatgtccaaaataaaagttgtagatcctgatgagaggatcaactttgttggtgaccatatttcaatttgaaatcatttagtatttacaaatgctgttaattagatttgtcatattgtcaaaatcaatttcaagctgttgggaaaaaattatatagaaaaatgaccaaaataaaacttgtagatcttgaaaggatctacaactttgttgttgaccatatttccatttgaaatcatttactacccgaaaatatattatagctaataaaatgaattattacacaacaactatatattttgcactcacaaatacaaatacttcaaatgaaagatggaaaatgagttatcggtgacgggtcttagtttacggccgatagagattaatctatctcaatcgtgctttgccgtagggcccgtcacagatgactcatcggtgacgggctccatactaatgcccaattgagatgacattcaggcccgtcacggatgactcatctgtgacgggccctaagataatgcccgatagagatagattaatctctatcgggctttaactaaggcccgccaccgatgactatttttccatttttccaaacaagtctttatatttgtgagtacaaaatatatagctgatgtataataattcattttattagtcataatacattttcggatagtaaatgatttcaaatagaaatatggtcaacaacaaaattgtagagcctttcaagatctataacttttattttggtcatttgtctatataactttgttcccaacagcttaaaattgattacaatatgacaaatctaaacagcatttgtaaatagtaaattatttcaaatggaaatatggtcaaaaacaaagttgatcctcccatcaggatctacaacttttattttggtcatttttcaatataagtttgttcctaacagcctaaaattgaatttgaatatatgacaaatctaaacagcatttgtaaatactaaatgatttcaaatgggaaagccataaacagctaagttgtacaacttatcaagatatacaacttttattttggtcacttcttcatccgacaaagtgatagtaccaatgtttacaaaattgacatatctgtgttgatatttataaaccagatgagagaaaaatgatttttgtgaataatataactatcactttgtcggatgaagaagtgaccaaaataaaagttgtagttcttgatgagaggatcaacttttccatttgaaatcatttagtatttacaaatgctgtttatatttgtcatattgtcaaaatcaatttcaagctgttggaaacaaagttatatagacaaatgactaaaataaaagttgtagagcttgatgagaggatcaactttgttgttgaccatatttccatttgaaatcatgtagtatttacaaatactgtttagatttgtcatattgtcaaaatcaatttcaagctgttgggaacaaagttatatagacaaatgaccaaaataaaagttgtagatcttgaaaggctctacaattttgttgttgaccatatttcgatttgaaatcatttactatctgaaaatgtattatgactaataaaatgaattattatacaacagctatatattttgtactcacaaatataaagacttgtttggaaaaatggaaaaatagtcatcggtgacgggccttagttaaggcctgatagagattaatctatctctatcgggcattatcttagggcccgtcacagatgagtcatccgtgacgggcctgaatgtcatttcaatcgggcattagtatggagcccgtcaccgatgagtcatctgtgacgggccctacggtaaagcccgattgagatgactcatcactctactataactagggtttctcagatcggatcgaaaatttttctaagtcccgctacagtttcccgtctccttagaaccctagcgccaccgtcgtcctccctcgccaagcccgccgccgttgccaccgagcccaccgccgccgccgtcgtcctccctcactgagtctgccgctgtcaccaccgacgccgaggccgaggccgaggccgccgcctccctcgctgagcccgcggccgccaccaccgagcctcctcggccctccatttggacctccgccgcctcctcaccgacgacccccccgagcccgccgccaccgccaccgagcctctacaccgaccggaccggtgtcggccttcctcgtcgtcgccgcccgcgtcctcaccgacacacgtcgccgacgcccaccgagcccaacgccgcccgcccggcgccgacctgcccgaccggcgccgccctccaccgagcccagcgccgccgccgcgaactcctccttcgccgagcccgccgccgccgccaccgagaccgctgcctccatcgagcccggcgctgcctccactgaccggcgacgccctccaccgagccccaccggtcatcctcaggtgagtcctccatcgtgccgccctctgctaactgtgaatgacatgtcattgaaatgtggatgtagatgatatgtgattgaactatgagtgagacatgtcgatgttgggatgaaatgtggtgcatttatgaattttgtgatagatgattgtagtgattgatgaaatgtggttcatttaactttatttatatgcaatgtggttcatgttgggatgaaatgtggtttattcatgttgggatgaaatgttgtgcattactgaaattattgtgaaatgtggttaatagattgtaacactcaattgtgtttttttgttattttgaagaaaagtagacgatgtctcagcaaggagaactaatgtcgacgacaactagtgggtcctcaagggcacgtactcctaggacagggaacaaaatccctaaggaacggttccgcataacagcggtgggcgccgtagggttgctggcatctccaaggaaaatattgagccgattaaggtctatctgcggggtcatagggaggcagaaatttagaattctgcaagatgacatcaagctcgtgccggccacagagaaggacattgcttggctaacgttcaaggagagcttcgattatcctgcggagcatgaggaccgtctcaggcaggctgctttcaaggttatgggcaatgcttggaagaacttcaagactaagctagtcggcgagttcgtctacaacccggcgaatccagatccaagagagtaatttccttggatcacagaacagatctgggaggaattccatgcgaagaagtcgacccccgagtccagagctagaagcgaggcatatcgcttgctccagaccaggaaccagcatccgcaccggcttggcaccgccggatatgctggtaaggaagacgaatggcagcgtgaggatgaagaagcggaggaatcgaacacgccgctcgtgtatgtttgcattgtttcccatcgtgcagtttatttaaccccactaaattgtaatgcagaaggagttggttgccgagcaacaagcctcgcaagaggcctgctctcaaagacgcgaggatgacctcctcacgaaagcgttgggcaataaggaacaccgtggacggacacggggcgttgggtcttctgttccctggaagtatggatttccagactacgcgtggcagtacaagaagcggacttccaacaaggcggagaaagatgcacgccttgaagccaagatccgggcgtcgataagagctgagttgacatctgaattcgatgaaaagctcgagtcgatgagggccaagattaggcaagagatccgagaagagcaacagaacccccaggccgccgctgctgctgcgcacgaagagttaggaagtcccacccaaaaacgcagcagttgcgcatcaactgagttggcggaaaatccaacatcggtcgacggcgccgtcaaccacataacggtaaaagtgaacttactcaatacatgaaagacttaacgaatccatatgatatataatattctaaaaaaattgattaatctatcgcaggaaccaatgagctgcaccctcacagttagggtgatgccgaccttcatggttccagcagccgagggacttgcgtacaagccgaccccagagacaaaagtgcatggagtgcaactcagggccgactgtgcaaaagttcaagtcgactcggtgaagcctgaatacgagctgttcccactgaagtatccaccgaacgacgaggtcctctcactaggaaatgcccgtggtaccttcatccaatggcccaaggacctcattgagatcagggttacagcgaggccaaccactgcaccaggcggtcgtccaccaaagagacccgcctttgctccttcagcccctcctgctcaagatcgtcatgcacaatcttacgatgtgtagttgcagtacgacacggattttggggaggaccgaacggaggccgacagcaaggcgattcatgaacccccaccgatgaagaagagtaggaaagcacactcttcccctcagagaattactctcgataaacccgaagcaaaggggagaggaaggggaggaaaggtgcatgcctcgcttctagctccaaggaagctagatctgggcaaggtccaggaagagactaagggcaaagaggtcaaaaagaaatacgtcgctccacaggagttccaactaggcatgccattggttggagatgacgtgcttgccgcaatgggcaccgcttgcaaggactttcacttatactacatggagaaatctaacgccaggaagccgaataaagctaccgatatccttggagagcatgatggaaagccattccttggtccaacaaattatatcgtggtcgacttcaaggatcttttcgatctctacaggctccgagcgatggacacaagcctccttaagtgctactccttgtaagtattgtcgcccaactcaatctagtaataacaatcggtttaactcacttaaaagatcgtttatcctgtgtgtaggttaagttggcaatggtgtcagaagcatgcaccggaaattgccttccttgatccacaagtggtcactgtcacaaatctccagaatgaccatcaagaaatggtcaattacatctacaacaccttgtggtcccgccgagacaaggagtacattatgtgcgcctataatcaacagtaagtgtgttatctaaatatacacaacagcatgacacattccttcagtacttaattaactttcactatgttaatgccgcggtgcccattggatccttctggtcataacacctaagtggaccagaattgataagaacgcatatgatttgaccccaattcaactagcgatatatgaagcgtgggcccaatacgtgcaaagaggaggcctcaggaagacaggacatgacacccttatccacaaaaaagacttcccggttaagcaacaaataggtgaccagtgcggattctatgtgtgccacaacatgcgccttctgtatagagaaaaggtgaagactttggctgagtttgaggtcggtggtctctattgtgatagactaactacattttagtacttatatatgatcgatcaactaatctggaattatgacaatgtagggcacaataaccaagtctctgcctaccagctttgaggaggttcacgaggagatagccagcttcatcctccgcgaaataattaaccccaaaggaatgtttaggcttaaactaaaatgatgaacaatgttgaacttttatgtttaggcaatgatgaacacttattatgcaactgtgatgatgtaactgtgatgcttatatttatgtatatatttcatatgtttatgttaagacttgctaaataaatatttgatccaattaactcggttttgcaggtgaaatatgataaatatttgaatggatgtaaaatatgtaaatggatgtgaaatatgagatggctgtgaatgtgtggttatgtgaaatatgttgatgtctgtgtatgtgaatgcatatgtatatgaatgggtgatgctggggagatggggatattggatatctgtgtttgtttctgtcatttttgcagcgagcatggctagcaaaggcctgaggctagccaaaaaacaaaattttttttttggattatagtcatctgtgacgggccataactaaattcccgattgagatgacggtcatctgtgacgggctctagtctaggcccgagtgaggtcagtagtcatctgtgacgggctctagtttaggcccgattgaggtcagtagtcatctgtgacgggctctattttaggcccgattgaggtcagcagtcatctgtgacgggctctagtttaggcccgattgagatgagtatcatctgtgacgggctctagtttaggcccgattgaagttagtagtcatctgtgacgggcgctagttgtggccctattgagataggtcatctgtgacgggctatagtttgactggtcgtctgggtcaaagctatcggtgacggtctttacttagggcccgattgagatagattcatctgtgacggcgcttttgcccgatggagataactcttcacatcagtgacttctagcctgtgacggacgttgtgcccgattgagatggggcttaccgcccgattgagatgagggtatccgttctagtgtcggaaatggctgcctggaggttgggggccgttggatccagccgcctctgatctcaccactgtggatctctccgttgctgatgttctcctcgacatacatgccaaagagaagccctccaacaccccctcaccctccccccccaaaacacacctaggaaccggtgcagagcagctcaaaggagacgatcgatggcgacagtggcttgagggagatgacaatagtgggagagatcaattacattgttggtggatctctactaggatgatggcggtgagtccgatctgttgaatgagttatggttggcaatggctgaagattttgatttgtgatgtgattagcttgttattgatatctgatgcgctttgttgttattcttgatgtaggctcttgcgttcttcttgttgatctacaatgtggatggggattagggggcatcaatgaggctaattttgggggcgaagggagagggagggggcgcttggctccgatgctttgagccagccttcctttttttttttttacttgcactagtgcaacactgatgcggcttctccactggtattaacataccgttgataatttttgtagtagtgtttgaatgagaaatgaggtttttattttgtggacagatcatgattcaatcaaccattattggtttttattccacgtagttcatcattaaaccaggtggccaatttgatattttttatacatctgtcaaaaaaagattgttaacaaggaaacaacacattatcgtgggatttttaaatttacatactattcataagtatttttaaaaatatttatcatatgcagttaaatactataaagcatctgataaatattttttaaaaaattatcgacggatgtattatctagatagtctcgaccgattaccatgcatacactggatcatttataccatgatacacaacaacattatatctaagtagagtatgtattacttcagtggtcagtatccactaccaatccattagtagctagtacaatctacgggaaatgatttagtcgattgatgtaatatatatctcaaaagtgcatattaattagataggtgagattgatgttgctagctatctcagtaagctgtccacatttaatattttttcttttgcaacttatagatactcactttccactaaatatatatgataaatacccgtcgtggcctacacttgattagttattgttccaaactggatattttgtccagcctgggtattaatgttagctaattgctaatatatataagctctgtttttatatactttgaccaacagtttattcaattacttaattaattaagagaactaccaaatatgtcatcaaaagtattttaagcatgcctgatctctctatttacacaaatattttttttctagaaaaaggaatagtcaaatgattgttatttttttttaaaaaaaatagcactcgctagctccagtgtcctatgcatggagtatttttacattactattattacctagcaggagtcatcagcacgtacgtgtatctcacaccgtagcatgcatatcccgatcaacatgtgcacgtacgcacgaattattatttgcttttctagcttggttgtgcatgtcccaccacaatcgattacacactacaattatttatgtaggcttgaccactagaaaaatcacataagatttgcaacccctccgacaattgtagagactggaagttattaattacagtatttcttttcattatttagatagtattccgattacataaaacgaccttacataacaatcatatggattatgagatatatatatatatatataggaaaatggttctatactcctagggagtacgtactccctctcccatccaccgttcatctgatcgatcagatatgtactccctccctcatcataacgggtttggctcggtggatccgattagtttttctaattaaaagaccggactgcttatcccgtaatttggggtttgctcccaacaggccaaacagattatcccgaaaattggggttttggggggcggcgcggcgacggaccagcgattcagcggcgactgtgtggctggcggcggtacagagatagcagttcgttccttcctccagtgatgactcctccccttcctccagcgatggatcctctctcaacagcatgtgttcctgaagcagaagtaatcgatctagagtcggctgaatgcaggagcggggcaacaatggcaaaatcgatgggccatagcagtggatttcatccaaagcagcaggttagtattcgtttatttttgtacggcaagatcaagacacgttgcctaaaattttcttctttgccgcagggtcacaggaaaattagtttgtcaccacagtccaaggtatgccacctgaaattgaatacatgtatgcctgtagagagggattaggtgtagttcggttcatgtactctctcagtttcagatgctaatttttccccttttagtgcatatgatggttttttgggtggatgaagttaatgctgttttagcccccacccccataaagaaaaatgtagatggtagtacgtactgaattttcaacggtatatactcattttttctttggagggaaactttttggaatctgctagacggtattaagtattgatttttggtgtggcagggttcttactgaactctctgttaggcaatagtatatactgaatttttatgtggggagctttattctctactttgttggacgatagcatatactgcattttccacatctatactgaatctttccacagtgattcatagactgaactttgatacgcaccagtatttactgaatttttcacagatatactgaatttttctatgggaggctttgtactgagctttgttatacgacagcatatagtatgtactgaattttgtatgtggtacatactgaacttttctagaagatagcatatactgcatttttccacatatatacagaggcttttccatagtggtttacatactggaccttgttacgaagaagtatatattgcacttttacatagagaggtatatgctgattttttacatacagtaatattctctaaactttgcatatactgacttttctttcagtgcacatgattttttttaattaagagggtacacataggtagaatttgctacgtagtattttgtacttcatctttccatacatatatgagtgtatgctgttttttttaaaaaacagaagtatatgttgaatttttaaatacactggtccatgtagtattgtctatttatgaaatgaaaaactaattatctgcaggctttgaaggtttctggcacaaggggcagcctaaataagactgctgcacgggtggtatccaggtatcggcaaagcagagttttaaatagacagaagaaagacaacactacctttggtatcaactgcaggtgtcagcccaaatgcgtagtgaatatcattaaagaattcgatgataggaagaaggagttgattggtgaagttgggtttgatggacttttggatatcaagcttactaaggtaaacaggcagtttggtgcatggctactgagcaaagttgatccgaaatcatgcgctattgttaaagatgtcaaccaggagttgccattcggtcctaatgatgtgaatgcagtttttggcttgccatgctcaggtcaacctattatcccttgctctcaatatgaattggatgggaagaaacaaatattgtgcgaaatatttgagataccaaacttttcacacctgaaaatatcactcttagagagaatcctaaagaagcagtatggttatcccatgacaatagatgaaaagagggttttcatggcggcttttgtgctttatgtcacaacgaagcttttggcaccgcaatcctgcgcaaacttcatatctcctaggtatattatggctgtttctgatgttgacaatataaaacagtacaactggtcccaattcgttgtagatgaggtgaagaaagcagcagaatcaatgcccacctgctttccgaataaggctcaactatccattaacgggtgtatcatctttctaatggttagcatttaaaactgacttgttaatgcagcatacaatcaacacacatattgtcattgtgaatcatttttgcaggtaaaatatttgagaaatctccagttccggaaggttgggatcacatgtgttaaaacatgtcacatttctcagtttgaggatgatcaaattgctaggatgattcaacaagatgtagttagtaaacataacccaggattccccttccctcgttatgggaaactccaggtatgtacgataccctggctgtaatatgcctatttctggctgcaaaatttagctaatttccgatatacatgctgttcagttgatgaaggaaccaagagaaaacaacccccatgtgccagagctatctcccctaaacttatgctctggttcgaagatcccatctagagccattaatggcggtaaaaatttaataaaattcctggaatcacacttctcttcgttagacgtacgtggaactgtcgggtcacaggtatgtcaaccatccgtatgctatgttacttgattgtttcttcattaagttgtaattttcacatgatcaagggattttaaactaacatgtggtatatatgataacataaaacaggcatacgaggagttgaaatcttacgttcaggatggattcgaccgcatcgatgagattttgcctaccatatcagatttcgtcgacataagcaccatgcaaactgctattcacgcatctaacctattcaagagagctttcaagactaatattacagcggcagttaagatagcgataagggcagcagtaacgaaagttattgataccattgaggatatacaagggcctctccatccatggggagacacaactgccatgggataccacacacccacaaactactccacacatgctacaaaagatgctagtcaattggatcaaccaacaggtaacgttgagtacatacaccattttaaaaataaaactcgtactacttgacactctaacaaattttcttacgctcttcatgtatcagatacccaacaatatgatcacaaaattggaggcttgcagtgtactcctccaaaatctaatggagctccaggttggtgtaccaaaagattaaaaattccaaccaacaatgtgtttactcctgatcatgcgaatgttttcagattcgaaaaaaaggccaaattcttcagtatcgcctacgtcgggaactcgcatgactaaccaatgttccattatgctaattgaagaattcggtagcgacgggcagaagaagcgcaaatacactgttgaaaacccaccatctcacttgctgaagcacaagtcaaagcgtgtagtcaaaccaaacaggaagctcatgtcacctttcatgtcaaagcaatgctcaacggagaggctggaatccaggattgctgacgacctgtattcctatataatgtctatttctgacgatgcatcattagagtaagtatcattcttcttccagaataattaagtatctcaccccaccaaatctgacattcatttttatccatggtttatttcagaaaaacatggctgcaaagctcccatcctttcagaatatcattgacgctacgaaacatccaagaaactataaagattgggagccaaatggattcagattctctcaaccttgcaattcgaataatgttccaacaagaagttgagagatttcacaacacaaactaccttggttggaggcatttcattaaccaagattttggggtaacattgcatgcaataaacaatatatttctttcatcaataaaaatataaattcaatgattctttctgtattgtcagatgtacgcgctagctggtgaggaattttgggaagctagccatcaacttgcacacttctcgggcccagaggtagtatatgatgtttcagaaagccacctggtgagtacaaatttgcagttcgtagattgtagaaactcttgtaaacaacagtacagaagtagtcccactgaaaaacctaaactttgcagatactgattcctgttcacctattcaatcattacgtgctgtacgtatttaacatggagagcaagaagttatcggtgcttgattcactaaacacagaagatccactcggggaatcacgtttcaccaggcatgacaagataaagatcatggtgtcacagtgtgtaatggaatgcatgcgtcttgcatctccagggtggaacatggacatacttaattgggactttgagacagttgaaaatatactagagcagcagaacgggtgagtgactcctaaaacaaacgaaatacaaccaacccaaagcttgtactcacactactttctcaaaaacatacagggatgactgtggcttttacgtattcaactttatggtgaactacgatggtcgtcgtcttctgaaccctattacagaggtacataatgctttcatatccgcacacactacactccaccataaatatgtcctcataaagctataaagaaaatactctaactttcgcaggacccgtactacctccggaggcaatttttgatccaccttttgactctgcgtgataacgaggcaatactaccagaatatgtggtggaccgtcttcgacaaattaaagacaattagtttagcaattttctacttctagctttaccagaacattttcatgtaattttcgaaatacacttctgtcctatcttgacagaatcatgaaaacattgctatgcatggacaaagtatcgtctgggttgcaatgacagttgcacgaactgtgctatggaaattattcactatgccaaacaataacagtatgtcatttacttccatttatcattttcaacgggaggattcaatatatgcggtgactctgcgtaaattatgtcattgactctgcgtgataacgagtcaattgctatcgatcattatgtccatttcagtgaacgggaggattcaatacattgcacagctaatttctatctccatacctaaaaaaaacaactcatatccacaccaaatcacactccttttgcaaacaatgatcgtcataaataccagtatactatatctctttctctctttatagagaaagcaccatcatccaaatgaaactaattacagcagacatccatttttaaccggtgcaaatacactacccaaaaaagacacaatttactactagaagcatactttacttaaggtcgaatatactgaccaatccacaggttacataatcttaataaattgctcataggatgaaaaaacacacgcctctcaaaaatttgttcacgtacttaaaacaaaacaacttctaacaatcagaggagtcccaactaaactacagggaaccatattctaaagttttctcttgtacgtagatgtccggccgcaagtccgcgaattatgaccagcttcgtggcatgtgtggcaaaacctacgaggaaagggcacttcatcctcatgatcaatgacttggttttcttcttcaacggactcacactcattggttgtgttcttctcaatccctacttcttttcttcttttcaggctggcaacctcaccacccgatttatacctattcaccttaggtcttcctctgcttctctttttcaacggtggaagtatatcagcagtcaaatttccaccctcgtcctcacttggcacgtcatactcactgtcctcatcacctccaccaacatcttcgtttccatcttcagtcaatacagtagaccttgatttatgcctagctgctcgcttcggagcttctctactattgtcaccatcatccaaagataactgatttttcatgtcctccaaaagcttattcatgactctcattgccatcttaaatgtctgcacatctttgttagcaatcttagccacctccacagtcttcctattcagcattacatgtctgtaactcctcgattgtgaagcatcgacatcatctttgtacccatgtagatgaggtggtatagtatcccgagcatccttcgtccatcttttcagtatatacctctctggaattcttgacaaaccatactgaacaagtacctaaagggacaaaccaatgcattacttcaaaaagccaaacactaccgaacatatagtacaacccaatgaaaataaatgtttagacagtagaagaaacaaatacccttaagatgtggctgcacagaatccccttatgctcaaacatcttgcaaacgcatgaaaattcctctctttccaaatcacaagacacctgatattccttcctaaggaatgattcttgcgagttcatccgtacaacttgcacagtgctttcgtcctccccaggtttcaccatgtaagatagactatcggttaactcctcagagaacaattggaaaacagccctagtatatacttgggatgcgtgaatctctatcggtgaccttgttttaatttcaaccttgtcctgcaccaagcgacaccaaatgttgattacacatatccataaaaagaggtcaacaaacctatcacagtggatacttacattactggtttggaattcctccgagtcctctttttgcagcttctcattgaaaaaccggtcgtacctcttaacaaagccattcatagagctagagggtgacacaaacatcttaaacacatggtttgcagactcacttctctgtgtagtagtcatcccagcaaagaacctatgggaaaaatatacaaatgcccatttacgccttatgtcccatatgtgacgcaagtaaacacttttttccagattataatctctaatcagtttgtgccaagccgcaacaaactcctcctctgttagtgtctgcgtaagaaccttatgaaatgctttcttgaatgtatgacgcttggagtatatgttccccataaattcctttgctttcttcagtacatgccacttgcacacacgatggattgtattgggaaatactgttctaatggcagctgccatggaaggacaattgtctgcaaaattaaggacaataataagcatccaatgaataacccatcatatacttaaaataagtaaaggataacgaattcattccaaattataaattcggccaaatactcacatacctgttaatattccaataggaaccttcccatttatgcactctttgaatgtattgaataaccatgtaaatgattcttcagtctcttctctaagcagggcacaaccaaagaaggtgctctgaaagtgattgcttacaccaacaaatggtgcaaagggcatattatacttgtttgttttgtaggtagtatcaaatgtgatgacatcaccaaaatgctcaaagttcaatctggacacagcatgagaccaaaatatgttcttcacacggcaagcctcgtcaacttgtatactataaaagaaattcttgctccttttttgcaaatcattcaagacatcaagtgttttttgcatgtcatcgctgctctcatcccgcctaattgcataagctagcctatccatagcttttctcgtgaatggaaccatggaaggtccgccatgcatcctagacaacataccatacatatttgtaagactcatactactgtctaccatctcttcaataataccacgagtcccctcatctatttgattgtgcgactgataattcttagtaactcctacactttttttcataggatggttgtgcgcagaaacaacctttgttactgaccagccactaccagctccagacctatttatcttcatcattgctgggcacccaattcgaacggaaggcttcttggtttttgggttcctcccctgcataaaagatttcgaaattaacacatagtacgtcaagtctttatttaggtaaatttctgctactaagatattgttacataatgtatgtacctggtgagaacaacatatttgccgcattgttctctgctttttagtattcttgcgatctttgtccagtcgtatcccaaatcctttactaacagcataaacattataaaaattataggcatccctctcagtcttaaatctttgtcccagcatcggagtaagaatttgaggatcagcatactcaagaggtatgacagcactgctatcaacattatctaccaccattctgaaaagaaaatgtacaatcagttttcagaaaataccaccaatatcctggctcaaaaaaaatcgtaaaaatccgtaacatgctgatacaaacatttccatcggtatcccagctccttctttttcatatgggtttccttctgtccaatccagtgaagggaccaaatttctgtnnnnnnnnnnnnnnnnnnnnnnnnnnnnnnnnnnnnnnnnnnnnnnnnnnnnnnnnnnnnnnnnnnnnnnnnnnnnnnnnnnnnnnnnnnnnnnnnnnnnnnnnnnnnnnnnnnnnnnnnnnnnnnnnnnnnnnnnnnnnnnnnnnnnnnnnnnnnnnnnnnnnnnnnnnnnnnnnnnnnnnnnnnnnnnnnnnnnnnnnnnnnnnnnnnnnnnnnnnnnnnnnnnnnnnnnnnnnnnnnnnnnnnnnnnnnnnnnnnnnnnnnnnnnnnnnnnnnnnnnnnnnnnnnnnnnnnnnnnnnnnnnnnnnnnnnnnnnnnnnnnnnnnnnnnnnnnnnnnnnnnnnnnnnnnnnnnnnnnnnnnnnnnnnnnnnnnnnnnnnnnnnnnnnnnnnnnnnnnnnnnnnnnnnnnnnnnnnnnnnnnnnnnnnnnnnnnnnnnnnnnnnnnnnnnnnnnnnnnnnnnnnnnnnnnnnnnnnnnnnnnnnnnnnnnnnnnnnnnnnnnnnnnnnnnnnnnnnnnnnnnnnnnnnnnnnnnnnnnnnnnnnnnnnnnnnnnnnnnnnnnnnnnnnnnnnnnnnnnnnnnnnnnnnnnnnnnnnnnnnnnnnnnnnnnnnnnnnnnnnnnnnnnnnnnnnnnnnnnnnnnnnnnnnnnnnnnnnnnnnnnnnnnnnnnnnnnnnnnnnnnnnnnnnnnnnnnnnnnnnnnnnnnnnnnnnnnnnnnnnnnnnnnnnnnnnnnnnnnnnnnnnnnnnnnnnnnnnnnnnnnnnnnnnnnnnnnnnnnnnnnnnnnnnnnnnnnnnnnnnnnnnnnnnnnnnnnnnnnnnnnnnnnnnnnnnnnnnnnnnnnnnnnnnnnnnnnnnnnnnnnnnnnnnnnnnnnnnnnnnnnnnnnnnnnnnnnnnnnnnnnnnnnnnnnnnnnnnnnnnnnnnnnnnnnnnnnnnnnnnnnnnnnnnnnnnnnnnnnnnnnnnnnnnnnnnnnnnnnnnnnnnnnnnnnnnnnnnnnnngtcaccgagaattttagtacgtactcctactatagagtaattctacggttcttgaggagataccatgaggtaccaaaaatttagtgtaaaatttggtacctcatagtacctaggtaccaagagataccaaatttacaatagaaaaaatggtatctcatgataacttctaaaggaccgtaaaattgctccctactatatatacacacatcccctgctgccagccatgcgtgtgtttgtactttccaaattcatagtagtagcgatttgtgcgtatacgaatgcagaggtggcgaagctgacggcgagcgagtggtacttcttcagcttccgcgaccgcaagtacgcgacggggtcgcgcaccaaccgcgccaccaagacgggatactggaaggccaccggcaaggaccgcgaggtgcgcggctcctcgtcgtcgtcgtcgtcgcgcgccgtcgtcggcatgaggaagacgctcgtcttctaccaggggagggcgcccaacggcgtcaagaccggctgggttatgcacgagttccgcctcgactccccgcactcccaacccagggtacgtacgtcatacacataagccgtgcgccaacgcattgaacttattttgatccttatcacatttttttatgtcctctacatagatataagatttgctccgatccaataaaaaatacctcaagataccggtatctcacggtaccaaatcatttccaatcgttggatcaaaaatgcccatccagatcagctagatccaatgatcggaaacgattgggtaccgtgaggtactggtaccttgagatactttttactggaccgaaacaaatctcatataaatatagtcaggttttcttaattaacgatgtagagatcgacatgtttttcttaaggagtctgtggataatattacttgaacatgctagctaggtataggtaggtagcacgtgagtgtatgttgagtaaccacgtagtacaattgtaggactaattaatccgttacttatcaatcgcacaagcgaccccccgtgaatcactagatggcaaaagaggacctctcacaggatggaaattaagttcatatggaagacagtgatgccaaactcgtcacagtcgacagggccataatcatgcacgatggatatgctcagagagagcaaactaattagcatgcccgacgccggcacgtgaatgtggagatacttcctcttgcgtacgtaggtagtgctaattaaataacaatcaacaatcacgtagtgctagtgtgctccttaacaatccaggatatatctgtacgggggtggtacatttgtgacctctctgtttctctaaaagaattttttttaaaaaaaatctctacggaacactttaaccctaagtgccttcgcctcatcatccgccccgccctttgacagcttaatatcgccatatcggcatgctagtactgccacctcccatgcacggtcccacccttgcatagtactctagcttgctatattgtcagcaaatgtaatgcatgttcccatgccacacttcttcctctttgttggcacccttccccagctagaagcacataccgcattaccaccgccgatctcagttgcaccccaattgacctggcctccttatcttgtaaaaacagggagcctcgtcaacaaaagaactaggcattgtcattgttaagagctagcatgtgcaaaaaatatagtcattatactatatttaggatgtgtttagttcacgtcaaaattaaaaaattgatcgactttcggattattcttattcccggttggattaaaattagaatgatatgacggaaaagctagaaatttgtgtgtagtaaagttttgatgtgatagaaaagttaaaagtttgttgaaaaagttgggaagtaaacaaagccttattgtgtaatacacacgagtatttactaatcaagaggaccaataattcccttgactagctagtgcttgacctgtcaaagccacgcgcgtgcatcggcgcatgtatcatgcatgcatgcatgcatggcgacgaacattcaacgaaccagaaggaagcacagagacagctaactaaacactacagctacaggacggcagtacccagtacacgcacgcgtacccgggcagccagctgcattatttcattatttgtttctgcctgggctcatcgatatgatctctcctcccctgatggagtgacagcacactgtacacgcaaaggacaaagctcaagctctcaagagtgatggtcactgtacatgcatcaatgtctgcatgcatgcgcaccacatatgctggcccccatgtacccgtggaccattcgtgcacactgcacaggcacaggcacaggcagtgagagtgtgtgtgtgtgtggaccaggcggcgcccaatcggccatgcagtatgcatccaatgacaattattggtgcattagtgcacgatgtcctactaactcgatcatctgctaacttcactagctgtactatgtggtactccacatacgtactggcgtactgctgtctcagcttgtcatggagatgccaaattatcgctagtacagaacttgttatccgtaacgactctggccgtgtagagggtttgcggccgtcacatggttatcatctctaacgagccgaaacaaacaccgttaaagataaactcgtatagacataatctatatgcacgttattttggcctgatagaaataactgtcatcctaacttctcatatcagagatctttccttagtgacgggagctcttcccgatagagatgaggcttgccgcccgtttcagatgtcatatcccgtgctagtgtatacgtgcttacgtgctagttagtgctaataattactcaccatgcgtctgcctttcatgtgttttgcaggaggactgggtgctatgcagggtgtttcagaagaggaagggcgacggcgacggcccgcaggacagcggcggcgccgcctctcccaccttcaccggctcgatgtcgacgacgacgttgtcacagctacagccgccggaccaccgccgccatgcagccgcagcggcgggcggctactacgtcggttcccagcagctggctgctggctacgactccgccgccggcttcgcgaaccccacgcagccggcggtgccacattaccaatacggcggcgcggttatcgggttcccggaggagttcggcggcggcggcggggtagcagacgagtacgggtttgggacatacttggacttgggcttcgagctcgacgacacggcgagtgttcttggaggcatcaggtcgttcccgcagggttggaattgatcgatcccggcactaaacaaatttattttgcgtacgtacgtacgtacgtatacgcgtcatatacagggtccgatcgttgaattaattaattccattaattgtttatacagagtttgtataggtttacgtcgtcttagagtatctgtccgggtttcgaaagattgtgtgagcttgagatatgatctcaattgatggatcatcgcgtatgtgtaaggcgaaaaatcaaatgtaatataaagaattcaagtacattgtagaggccggattttaatccattttctattatatactaaagaattcaagcacatacctaatgtgaattactaaaatacactaccaatagcacaaaaattgttttttctgggtggtcaaaaatactttttttttcaagggaggtgaatgatctgcctaaaaacaaaggctaccgcttataaaaattgattttcacatgtggacactgaagacacacatgcatatgaaaaatcaattttcacatacgggtccttacgacccccacctagaaaaatgttttgcccccaaaaaaaaatgaacaatacatgtagcatcgattcaaatccacatgcatctagagattgagatccacaccccacaacagaatcaacacatcacaatgcaagaaaaaacatgcaaacattaaaaacaatataacttatcacaatacaagaatctacacagactagaaaaatcaatattcagctgcatcatccttttgatcaccaccaacttccacgacctgatagtgtcctcaaccacctccgcctcatccacggcaacagcgatacggcggcaacaaagagcaactatagtgacagagacctgcatggatcccgcgctccctagcactgctttcggattcacaactcgtaccctttgccgtcacgactatcggattcacctaccaacctctgccattattagatccacctcccccttgcattagcacaatcggatctggatgattgctccaccaccacaccaaatccgctttctccaccggtgccgctcctcctgatccacttcccaaaagactgttgccgccagacccgccttcctctagcaacgcaacccatcatatcctggtactcctcaaccactgcaccgtcactgacgctcttctcttggagaggttttgtgaggtgagagagcatcacccttgtacatgccccgctgcagtcactagggatttagcaaagcgcttagtcagggagttgtgctaagctacttgctcgattttactaacgtccgatgattataacaggcggtcatatatatttagatgaaccatgtgtgaaagtatgcatatcttcagatacggctctattggaggtttgccggttaaaagcgtacgcacaaaacctcgtcatcattaataccggccgaactttggaccgtgtataaaaataaaattaacatgtctttgaaaatggttttgttttactaatcagatggatatatattacatatataaactttttttcctcgcaaaaaaaagtttatatatgtaatatatatccatctgattttttttaagttctcaaaaaaaatctgattttttttatatatattaatgcctgcaagcttcaaacacataactcaagctgacacatggccagagacgtacatggtactgctcgctcgtgatctgtggtcttttactcttcgattttgctatatctcactcgaaagattttttcttatctctcacttgattttctcactcaaatttacagtgcattttcttgtaagttacagtgtaatttatgaaacttacactgtaacttttgtaagttacactgtaatatttgaatcttcgcatgtaaattttaaattttgtattggttttggtctttttcttaagaatacggtaatttagtgtccattatggtgtttcttaattgctttttgctttttattatatctatcggattttaatccaaagattaaaaatctgtgtgatataatcataaaaatctttcgaaaaatgtataggtactccctttactcttttcagtacaccgagccaactagggatatctgttctctgtcctgtcctgtccctctgaagttggcgtcattttcggccgtgcgtgtactactgaagcagcaggccggcccgctagcacaagcgtacaaagctagcgaagcccaagcctgaagcctctactcctgcttgggcctgacgacgacgtacagtaccgtgtgtgcggtagctgtatctactgctacgtgcgtagtgcgtagtagtacgcgtttctgctttggaaagccacatcgatcgcccatatttcctaagaagacaaaatatttgtatctgtttataataacttaaaaactaatgctaaaaagaaaattgcgttaaaaatatattaaaatcaactttaaaattaaactaaaagaaacatcaaattttagtttttctttaacatcaaccgatgaaactgggagactcaggtcccgttcttttatccaacaagatttggataaagattaagatttttgtggcacgctttttaaaccgctaagtggtgtgtttcgtgcgaaaactttctatatgaaagttgctctaaaattcatattaatctattttttaaaaaagtttaaaataattaaaattcaatcaatcatgcattaataccacctcattttatgtaaaatacttaatatccatcttcatctttattttcagaagaaaaaaacaccatcatcggagccgtggagggggtactcgtcgtgatctgcaggtagctgttggcagcaggtgcgtgattgatggagcgagtacgaaccccagtagtgcaccagtgtacacagccatcatcaattcaatggctcgtacgtacgccgcctcgtcgcacgcgactacgtacacgagacagccagccaaagccggccagtcagccagcgacgtacaggagcgtactgtagtaagccgatcgctatgcgacacagggagcgtagcccagatttgttctcgggcgacggccacgtgccggtgccggctccggctccgtcgtcgcgcgcgcgggctggtgacctgggtgtagcatgcacgtggggcctcgggaatagctagccctcgtcgccgagcgccgacagggaggacggcggcccatgcgcccctcctgcggcctcgcgggccccggctgggccgtccaccccaccggtcaaacacgcaggcggtcaaacgcggccggggcaagcgtcaccgcgtcagcgagcgggcggaggggggatgcagcggccgtccgccacgcggatcggagagcacatgcgcattgcccgcgccgtgtcatatctggcgatgtgcgtgtgccaataggccggcatgctcccatggcttgtcttggtgatgtactagtccactttttccatgcacacatgtggatgtgggggaagtttcagtatctcacacgcgcacaaactatagtcacagaataataacaatatataggaaatataaaatacaaatatactgaaagtacgtacacgctaatgctaatgaagaagacgtacgacacatcacgcaggcatgcatatgcataatgctgggattggtctagctgaactagctagttctggcgtacgttagggccgggctaccgatcgatggactggatccaatgctgacaaggccgtcgagatgctgtgatcgattctggtcgatctctgcatgctcgatcgacggcggcggtggtccgtctcagtgcggtcgttgtcgatcagctgcacactgggactgacgatgtctttgaaggatgacagaacaacaagtaggtgcgatatatgaagcaccacgactagtactgcttccccttctgcagttcaccagctgtaggctgtagcgcaggtctgaaccattttatcttccaagcatgtatgagagtaagacatgcaagagagatcacaagagttaagggacaatattacggataagtggtggattcagaaaatcgatacaccagtgccataacatatttacccgtgtcataatgtgctatgtatgtctaaaccatattattagaaaagttttatggtactttcaaaaaaaaaatctcaaagtacctaaaatttacccataccttagagatacctattacaaagatactaaattttacattagaaaatataataatcccttatactttttaaaaatgataaaattacctttatcattaccttttaagtaggtagaagaaaccatttaataggttttgccaaagatgttcgggatcgtctgaccctcatccaacttaatcattatagatcatgatgggtcccatgacaattgtaatcatttttttaatcatcaacagaaaaatataaagccaatttcaatattgaaatgaaggagaagccatattcaaatattaatgcatcgggatagcatataatataactatacgtgaaggtacgttcacatacacgcatatatgaggaatcatagaagtgtgatggtcgaatcatagttatgtgactctaaatattagggttcaaatctcgttgttgacccacaaatattacacacgccgttgagtttttaatagaaatttagtgagactattaacattggcatttatttctttgagtgtgtgttaagatgcagctcatcgtaggtgtgtgcgtgtagtgtaggagcaaaaagtatgtatatgtctttcatgtaataagaaaacgcaggaatggatgcaatgatgtaagacttcacataccactaggccctagctaaatatgattccacattcatacacacttacatatgagtaaattctagtataaaaagtgtatattgttttttctactgataagtgagaagaaggacaattattcatggaagacctcatgatcgatgatggtacaatgacattaacccaaactactacgagcacaccacattaagtcttcgcatttgggaatagagatatgggtggaggtggaggctcgaagggaggccatgagggcaggatcctagaaaatgagggagatggtggtaagacaatggatagcgccacattaagtctctgcatttgggaatagagatattggtggaggtggaggtggaggctcgaagggaggccatgggggcatgattccagtaaaggagggagatggtggtaagacaatggataacggtagtgcactagtggttgtaccaaagagagagtgacggtggatgcttaatgctgttctagtaggcataggaaggagggggagggggggggggttgagagtaagagaggagttggtttaattaagcttatagttggtgcacatatctaaaagcaaatatttttctaccattacaccaaacaccaaagtcacgcactcgcacaccaacacacgtgttacctaatacatattcagggagatggagatgaggtgtccctaactatgctaaaaaggataaaggcaagcaacaaatttgtgtgtgtaatatttatggacatactctcttcgtcacaaaataactcaacctagctactacgggatgtgatgtattctaatactatgaatctggacagattcgtagtatactaggatatgacacatgacacatcatatactatattcgtttattttgagatggagggagttgatctcaaagcaaccctaccttctactaaaagtggttgagactattacttatttaaaaccaaatgattgacaaatagccggtcccaaaatatgtgtgcatccacacccaattatgtcaagatagaattcatccctctgttctccacatttgtatatgcatgtgcggaatgccctgcatgtgtgatctgcatcactgcatatgcttagccccttgcgatctaaaccatcaattgaaatttacatcaacatcaaataaacaaaatcgaactatattatttacacatagctagtaagcttgatgggcatatggtacacactgctaccctgactgctgaagatcgacttaataaatatctttcagaattctgaagattattaggttgatcgagtagacaataacaagattaattaaatataaccatattatgcaataaggtattaatttgtagctgtcgtaacgtttactgaaacataaattcacacaaatatacatgaattcaattcacacatcgcaatgtgcggcaaaatttttctgttattatgagactcaagctgtgttacggttgtcctggctgaatcatttcagaacatgtgtgctagctcaagatttgagctctagctgagattaattgctggttgtaaagtgatgtacattcaatgtctagctatgaaaagtcaaatgagacacatatatttcctagctagccccggcaatatatttttccaagcggacgaacaaaacacacgcataagaatacatattaaggtatatcttaccttaggtaaatcacagttttagtatgtagtgtttggttcataccacaaatgtactttgcctaaccattagccacctagcccacatgtcatacactctattttttttttgcctatctttatttaagcttagtttgtcattttgtttgccacaaaggtgtttgccgcaaaagactaagcttagtcaccttactaaaaaatgtgtggcaacattagttctcaatcaaacaggcccacaaaacatctgcaagttactgactattacaaataagtacaactaatcaaggataatggtcaactgctctataaaatattaatgtgaagcaaacaaacaattccattgatttggggaaagtacacatgtattcctaatgcttggaaagaataagtaataattggtcgtaattaagttgtaattaatgcccattaactactatatgttgatgagaaagcatttactttactttgtgtgtgcacgcatgtactacatggttttttttaaaaaaaaaatcagtatcaaaattttgaaaatatgtagataataagaatatataaaatctttttatagaatgaatcttcacagtattagtatagctcttgttgggccttacagatatatcacaataatagacattagtgttcaaagttatatttcgaagatcactaggtgtccatatgagaagtactccctccattctagaatattaagtgttcaaaatctataccaaatataaatatttctatagtacaatttccctaccaaccatacatcataagtatttaattctcaccaaatattaccccaaccgccctttcactgtatgttcagccatctataatttaatgcggtatatcatagtctttttcctccaccgtagtatattttaggatggatggagtactttttactagagcaaaaataatagttcatttcctagtgaactatttagatgcatttatggttaatcttcactggaactcttcatttcacattaaggcatcttatttctcgctccttacctctaaacttaaacaatttaatctttttttggcctccctcaactttttttaaagaaaaggataaaggttttcccctcctctactataaaaatgacaaaaaaaaagtaggtagtcatggatttatctctcattttgagggttggtggattcaattctggtttatatatagtttttttctcctcactttattaattgatgattgtcttcttatataaaaaaaacttggtgttacgtttatcacccgttatctatgcccttaaattataattcaattgcacatattacatatatcaactccatacatttcaaaatatagggcacattttgtttttgttagaacaagactttgactaacaattgcttccctaatatattatttatatgacacaaagaagtataagcgtgcgaaagtacttttaaaaacaagactaataacattaattttgcttcacaaatattatattagactgctttcgttccatattgatcatcatataaaaaaacagaaactctaaattgatcttcatataaccatggtgtcattgtttgacgtgtaacactattgcatctatgcatgaaaattgagtctatgttcatgcatttacacatttaggagtaactaaagactcgtttcttgtgtatgcgaggagttaaatctgcatgtttctttattcttccccatcacatacacaccaaatgaaatatatggtagttaagtcttccttggtcttggtgaaaaagcttatatgataatcaatatggaatgaagaaagtagtagaataactattggtcaaagtcttgttcaaacaaaacaaaatatatcctatattttgaaatggaggaagtagtaattgaacacgtcgctacctcaactgaaactataattaatatgaacacacaataaatacaataataatgtagcacaaacataaaaaaacaaaagggttgcaaactacttgccttttcaaactaacatgttctaaattatctagtaataacatgagaattcattgaatgattctgtctaaattcattatcttatatatattgactttgagtccagaaaaactacaccctaaaaggcagtccgacaacataatcaaaatgtataacacatgttaccttcaaacattaataatttgctaagcatcacatttttctgaaaaatatgacctggagacaacttgttaatttacataaccaccatatatcgctaattttttttagtaagtattctaagtattaataacaaataaaggtgctaaaaagctatgggttgattatatcaaattgttccgctaagaatggctgagtacataaaattaagttagcacaaggtcgatggtatcatgatgaacatttgctaacatacacacactagaaacactgaaagtttatactatcatataattataatttaattaggctttgaagtagttaatagctccatacatcagttacaccaaaatgttaatcatctgacttgttttcacattctgttgtggatagcatgaaaaagggtgtgtgtgtgtggggggggggggagggggggatatgtatcgtatctgtgcatattatgaacacgaatcaagttgtatcaaatatatttttgaagtctctacatcatttatcttacaattaattagggatgttggacaaaattatgtcatcgaattgaaccagtgtttatagatttacttttaattagttattaatgattatatacatatttgactgttgatatatgcagacatgacattttcatgacacacatatatccatctatatatattcaatgcttcatgttatttcccttgatgcatctctatgtaaaagttaattgtaatggaactcgcagaccaactactatagctaagtgtagtacctacattatccacaatgactagcactgttaattattgatcttcttatatgttcatcatatgatctttcaatctagctagtctacagctgaagatcaatattggactgcaatatggagtgctcgtccacgatcatcattctgctgcatctctatggttaccaacaaataatttttatggtaaggaatgtcctgccaacccagatatgtaataatcattcgttagatgttttgctggtttagtttgcctatatggctatatatatatatatatatatatatatatatatatatatagagagagagagagagagagagagagagctatctatatcctttatgcacctcacacacacactacctcttgatacaaagcataattgtgcatccatgcatgtggatgcatgtcatagtttcacgcatgaaatcatcaggagctgggcacaaagccagagatgaaaatccaaaaacaaaatgacagttcgaatcaaaaggatcaacgcaattctgggggcaaaaaaaaaaacaacctagctgaacagttgatatgtacagttaactaaacatgcgccatcccctcatttggcttcacccccatgttaactagacatgctactatactgatcaagtactaccacgagcggcggggagaaaaggacatagctataggtaaaactattcggtaatttgaccctctatccgcgaaccagcagcaggcacgcggtctcgcttggtagaagaagaagaacagtagctagccagcgtactgttcatggggagaccgagaggattagcgcaacagtagccgtcgtcgtccttgcctccgctccgtgcgccgcgagacagtgccctccgtgcgcgcgcgcgcgcggccggcgcgcgggagctccagaaaaaggaagcgacacaggaatcagaacaagaaaccccaagaggattcgtggaggaaaaaaaagaagaaaaaatggagagtatctttggattggactcgacaagcaattcgcacacgaggttcatgcagtgcagcagctagctagatctggcacgaaactagtagtacaggtgactatggagagagatgccagatgcatgcatcgatccatccatccttggcctatctctctagagagttagagagagagagatggagtgtgaagaccggtcaccggccggccactctgaatttctctctctctctcgtctcgtcctctctctagactttgaggggcatatggtacgtactacaatatactactactactactccccatcatctatcatggcagtgaaaagtaagagagggcgcattcacttgcttcgacgagcaagaagtttgacaagaaaaattaagcgggaggagaagcagctgctagtagtagatgaagtagaagcgaacaacaaatgtagcatcgatcaacaagatgatcagtctgggatggagctagcggccggcgcgcgtagaattgataaaaaaaaaccatgcatgcatgcacaagcaattaatcgaaaacctacataaaatatgctcaatccggcgtaccaaatggcaaatgggtgcgtgcgcacgtacgtgctagttgctcgccatcagcaggccgcgccggcggacggcggcggcggcggaggcggcggcgggtgcgggtgtccgccgccgccgctggtgtcggcgggctgcggcttcttccgcttcttcttctcgtagctgacccccctggcgcgggcctggtgctcgcggacctcgcggaggtagagcctcaccgcgcgcaccgcgaacgggttcgactccggccgcccgccgttctcctcgaacgcggcgcggaggcggccgaccagcgcgtcgaggctcccccacgcctggcgcagcgggcaggggcacggcgccggcgggttcgggtggccgaagaaggggcacgccgccgtgtgcaccttcgtcttcccgaactggtccagataccggaggaactccagcacgtgcgcgccgctgcactgcgcgagccccagcggcggccggtggttccgcaggtactgcccgaacgtgttccagtcccgccgcttctgcgcctcgtaccggctcggcgtctgcggcgtggcggcgccgcctcccgccgacgacgacgcgcccgcgctgctcgatccgccggcgccgtcacctcctcctccgccgccgccgcccgccgtcggtggactgctctcgtggttcggcggcgacagctccatcaataatctgccatcacaccacccaagaaaacacagcttgatgcaatcctctccccttcttcaacacgatcgaatgatgaagctgatgatgattccatgcatataatctgggtcaccggggagagatcgagagatccatttggggttggtgctctgctctcctccgatttatatatgtaattcttatcacaagaaacaatacatttctgcgacgcacacatgtgggaaggtatcgatgggtaatggccaacggtaccagcatgctactagcttactatacctttctgtggcggcggctgcaccggcggctgatctcctcctctctcgtcggcagccgtgtcagagcggcggagaagaacaagaatctgcaggagcaagagctcaatataaggagaataagcaaaaggagagatcctcctttcttctttttttttttcctgccactcaccctgccttgctcgcggtggtataagctgctgctgctactgctggttcttcttctcccctcatagggccatgaatccccacttcctcagctgctactgcttctcctgcagctgctggagcttgtgctatctaggagtaggagtgtgcgaggagagaagagtggggggaattgcatttgacgcgcactgttactatttttagagaggggggagggaggcgcagggggtggtggatggattgtttggcctaaaaaggagagatccctgaagctagtgtgagagatggaacagaggcggtatagtagtgagcagtcagcagctgcagctgtactgaagaggtagtgagagggttgtgctactgttagggcttttaggtgaaagggaggaaagggacactgtgagtgtgaagtgagaggtgacatgactaaaggtgaagaaatataaaaaaaatactactactaccagtacaatttctctcgtcgtcgccgtcgtggtgggggtggagaaagcgaggtcggtcaggtctcttcctccccactggagctcgatcgatcgatcgccggccgccggatcgggaacggacgggcgtcgcggcggcgggaggaagagtccaagacgtgcgggggccccggcccccgcacgcatcatcatgcgagagatgtgtgggggcagagaggacacatctggggcgtccagcatccaacggacgactcgtaaagagggtggggccgcgcgctgtccgtacgaccggcgacgatccggccccgccaccgcgcggagacgacaacccctcgatcggagcacgtaatgggatggcagcagcagcagccctgcctagctagcttgtccaggagcgcgcgcacacatgcttatgcgaattaagccctactcgatcaggtgtgaaattgttcctgcgtaaaaccgaccgaaccgatctgaatcgtgccacacgcatcagctcgaagaatttcggatggattctcctcacgaaggattggaaagaaatatccatgggataatggccactagctagcttgggcggcgtacgtgcgttatcaattctgcgatgttgatttgggtcgtcgttgctagtgtggctagagctaagacagtgaaactgagcgagcggccaatttgtttcgtttcgcggaacacacgtacgtaaggctttggtgttcctccttgtctcgatactgttgtcgcaatactactacgtacttgagttctacagctaataattaaaaacggttttgctagctagctgtcgacagttttcaggactgaaaactgccaatttttttgactgttgattccgcgctaaaatttatgttgagatattttgctatcggatctaaaccctctttccacaagctagctacaccatttcatgtttatggcagatttattcaagttacatgtaagttatatcctagttacattgtaactatagtgtaactacactataactacttgttatctctatataaattagatataaagttgcatatattattttaatacatatgtacaagttattattattattattattattattattattattattattattattattattattattattattatagtgtagttctagtcaaattatatactatagttagatttaaaagtttttctctcaaaaaacttgcgacggttttttagctaatcccaattaagaaagagtgatatacgtactgaatcaaatactctctctgtcccattgtctaggtttatagctaaagatacactctttaagaaacggagggagtgcattatatattggccgacatctttctctcaatatataataatcatatattgaatttagtgtattacatatgtgttatatgttggtagaatattttcctgattatcatgaataaaactataaatcgcgatggtccaatcaatattaattaaacatatttcgttggaaaggaaggtttatattcatgccaacatatcatacaggaaacacggaatgatttatacaacttaatcttttttcatatgtagattattgatgaagtcaaggaagaagtaggggagagagaacaacatatagaagtagagattttgaaaggcgaaatcgccttagtgttattcaagtttttcttataggcacaactgatttcaagataggattcgagctatgttatagcgacaaaatgatgcaaaatgacaataaagaacaaactaattttgaaatatagaggaaaatattaagataatttcatttgtttggtgccattatttctacagaaatgtcaatcaatcgactttataagatacctagatagttttgtgaggtatataaccctttatttctatgctttttatacatgaaaagacaaaaacatctattgctttcactatcttattttatttatcatatcgaactgattcgatgactttacgacacctgttgattggggtctattgttatgtcctaactagtacattaccaagaaaaggtacctagaattttccattttggtaccacgcatggtgtaaggctgaaactaaaccctctcaccatttggctgacacacgacttgttagagtttatggtacaatgattgggtggatcaggagatttagctactaaagttttatttgaaaagtcgtctttctgttctaacaactttgaatatatctagcttttaggcgcttccaaagaccacaagctggtgcatatattgtccgtaataatgcacgtggggccagaagccatatatgtcactgttattgggtagggcagcatcaacattcatttgccaccatcatataccacatcagacgattgatacttttattactctataacagtggtagatccaaccaatagaacataaccaaatatccaaacccatatcatcacttgttcgaaaatgtaattgctagtagactacaacaaaaaccaacaacaataatatattattggttttaagtgtgaaccggtaatgatatttaaatatctatactacaaacttgcagaaatatgtatacttgtaataatgtcgggcaaaaccggttattaatttagtgtcgcacatgcttgtgtcagtctcttgaaaatctaagttgctcatccggcgcgctctctctcttatcccctctctcatgagctctactttatttctaactgtggttgtattcttttggaggggttcagaacccctcccctccacagataaaaaggaacaatgaattaacgcatgattaattaagtattagctattaaaaaaaactttaaaatggattaacatgatgttgtgaagtaacttttttctaaaaatacagaccgtttagtaatttggaaagtgcgcacggtggaaaattagggtacttaatttggtgggtttaatcctccccttttctcccatcattccaccctttattttccccaattcatccttctaaaaatttgtggatgaaaggtccaatcttctcgagctcagggccgcttcaagcacgagaggtgccggatcgatcttgcaccgctccacgcttgacgcttaaaactacaaaccagatccagcgacggtgcagtgcagacataacgacgagaagacgataatggcaattggcaagtggtggcctcaagacaacacaacgatgatgatcagagaggagaactcttgagcgctattaattccagctgcgacaacgataatagtgttttttttatttttttcaaaaaagagtgtgccactaccggtttatcagagtaagtttaatagtgtagccaactactagctccaattcatctatagctaatctaatagctcattcatacaatagttacatactacactattaatatatggtcctgcttgtcatacacacactgcatcttgaagtccatgctacagctagctacaaatctgtagcccactgtccttctctcttcttatttatctctttaaaatatgtttgcagcttgcttataacatgctattgtacctgctcttagtatctcttgaatcagtagcgttaggctgcgttcgagcgcaggagaaagggagaaagattgtttcgttttccgcgcacacgctacccgaactactaaacggtatgtttttttgcaaaaaatttctataagaaagttgctttaaaaaatcatattaatctatttttgaagtttaaaatagttaatacttaattaatcatgtgctaatggctcacctcgttttgcgtatcttcctaatctcctcgatctcctccttctcaaacacacccttaatgtgtacttctggagtatgcctcaaatattgatctcaaatatatatgacgtctcctatatatgatatctccggttttatatgaaaggcaaaagctgtactcctactagctagctagcgtacaataagctagcagcgctgcagcttttcttggttaattcgatgcaattcacagtgcagattccatttgaccagccccaggacgctgcaatgctgtagtaaaaggaggagtacgtactggccggctggcttggtctatctatgataagtctatcgtgcttgctgtacttactggactgcaccactgcttctcatcagtgtgtgcaacgcccggcgcccccaacacatatatatgtattcacgcgcttaagacaataagctttgttctgcatatgccctggctttctgctctttcccctatactgctttttatccgtgtttatttggtttttcttgttccataggagtacatatacaacctctgttcttaaatattaatatttctatgattcaattttgtaaaatataagaatttctaggatactaattcgttccaatgcatgagaatctaagcatttccagctaatcagctacttcagagaagaatacgatattcaaaatttaactaatgactgaaggggaatctttcactctaaccttaagctttacttcatttgttcacaaatataaggtagtttggttttatttaattatggaatgaaaggagtagagatacgaaagaaactagaatatgtactccctccgtccacaaaatacaagatattttggtgttcgatttttattgacaaacatgagagaattttatgagttttatgagttttgtacccattcgttctaaaatacaagaattttatgagttttgcacaattatgaaggaagtagctgaaacaaattaaggttttgattgatcgagatgagaaaggagatagaaaaattatatgggtgatatttgtgattagttgagatgaggaagtagctggagaagttatattattgttgaacaaatttggaatgctagctacaaatattgctatattttgagatgtacagagtttcaatccatccgaccattgtatttattgctcgttgatagttgcatgcattgctagacgcggtttttcaatcaattaaatagatgtatcaaaatgcaattttacattttaaactatgataaacaacttacagttatagaatcacttgtattaattatagattgtgaaaattgtgaacatagggagtagatggttgttgtgtaccatatagcgtgtatgcaacctagacaagtcattgaaatcgatgtacttgtgttgtgtgtgtgtgtgtgtgtgtgtgtgtatgaggtgtactgtgtacatgtgtgcacaaagtctccttgtaccctaaaaggaagtttatcgtgaaggaatattactgttactagctagtccgtaacatgtgtatatttgtacaggctacttatattacatattgtgcaagtatgtaaatttgtaaaatatactagttcctttgcaaaatataagcatatttctatgaatctaaacaagcaatgtatagtagaaatgtttatattttaaaaccatgggagtagttaataattaaatcatcaagctatgattaattaataactataaattaaaattagtcaatattcttttcaatggtatttcagtacgtatcgacaccgtctttaatacacctgttttgatcattatttttctaatcatgtattcataaaattattactaaaacatactctctccatctacttttgataggcctatttccaaatctgaaaattttatttttgataggcatatttcaatccaaccacctatcatcttaataactttcggatttaatgcgtgactctccattcttccaaacaagattggctacatgggcatcgaaaaatataaatataaataaattgcttgtttacgaggaataacttgtagcatgtttaaatggatgataagtagaattacttatttttggtcattgtgacaagatgaaatatgactatcaaaagtagatagaggcaatatataactacataaaaggaattttcatgacaaatccaaatgtcattttcacgaacctaatcttaatgttttccatatgtcaatgatttaggatttggagtttttccatgggacttgcagccgtataattaattatgaagatcagagatggatttatttcttgatgggtttgttcaaagcatatcgaaaggcagtgagccagctgtgacaggatttgatgcgatttccattgacaaagcatcaagttcattggcccaccctactacgaaaattattttggttcatgagcacgtgtccatcaacggttggaagagagaagcaagttcatcacatgatttgagttatctcgcatcatttatcgtggagaagcttcaacgcgaggagagagatggaccaacggaaaactgtactgcatatatcgccgtgtttagttgcaaaatttttcattaaacttctaacttttccatcacatcaaaactttcctactccctccgtcccaaaaaaaatctaatcctgggtttgaatctgatatagaacactcatatcgataaaatggtttgaactagtatttactagaaggggcaccctgctcttttttatccaatgccgaatcgacgacctatgtataaaaaaggagaaagtttttggatttgaagaaaaaagtaggaattctatccattttcattttccatttttctatttagtttttcttaatgaaattgaaaattttaactaaagggcaaatacaaataaaaaaacaactttgctgcccacgatagatttttatctaggcggaagagtcctcttaatatttatctagtcttatatgggtttcggtatattgaaatataaacagaaaagagagggtagaggataggctcattacattaaaaaaaatatagaagtagccatagcaaaaaaaagaaaaaagggagagtgagagccaaatgaatcgaaagattcatgtttggttcgggaagagatcataaaagttgtaaacttaatagcaaggtaatctactttcattaaaagatttattagataatcgaaaacagaggatcttaagtactattcgaaattcggaagaattgcgtagaggaaccattaagcagctcgaaaaagctcgaattcaattacagaaagtcgaactagaagcggatgagtatcgaatgaagcggattgggttttttttagacagagggagtatacacataaacttccaacttttccgtcacatcgttccaatttcaaccaaacttctaattttggtgtgaaataaacccaccctatatatgtatgcaggcaacgcacgctgcagcacagcatgctgctcaggctgaagcctgaaggacgacagcacgaaaaagctactagtaaatcattgaagcttatagtccaaattaagtcccccaaatcagatgcccaatgctgttgttagaatggtccaaattctttttccagatctaatgaacctctcaataattatggtggcatgcatgcaactcttattagcttgtcgcttgcacctgagtactatgggttggtgaagaagaaagagctttgcatgcatgggggatcatgataactgaaacaagacgacacatctgctatatacatactctgaacatcatgagattcagcagtgcctagctaagccgactattaaggccgaaattaattaagggggcatatatgtggtcacgtacatgctcaattaattcgcaggcgcacggctggataaatatttatgtttgctgttgagctatgtttatctaccggccccggcagtaagtggagggattaacagcagcaccttcaactcatcggtttactgactatattattaaaaaaaatatttattggtaaaaattttatataggtactctttagtgagttaaaagcaaatgctgagaattaaactatgatggaaaaaactcaaaatcaactttaaagttaagtttttaaatttaaattttcgcttataattaagctgaagctaaacggtatggagctgtgtgacctgtattgaagatgcgcactggcactgcaggtgatatgatagcacgattagttgagttactcgcagaatatatcagatattaaacgccggaaaattcttgctaatgaaaacagagaaattaaagaaaatgaagcaattcacttagtgaaggatgggcagcattaaatgttactactcctcctccatttgcagttgtctttggagattacttctacagtgtagtaagtatagtactatactactgctactactgttactcgtacaatcctttgcatcatttattggagtgtattgccttactagcgagtagctatgtcaacagggacattcctgtgtgtcaatgtgtggtgcatcattatcatatctcagcacgattctagccatatgctcaggactcgatcggggatatcaaatttccccctatatactcgatcgtcactcatagtgtacaaccatactgtactttgtagaaacataaaattttactaatatacattggttaatgtacattagaaccgcacgaattttccagctagtacgtacgtacgtacattaaactatatactccctagttgatgacttgatgtactgcattcaaattgcacgaattttccacgaatgtactacaaatgcgtcacaaatgaccataatattttacattgaatgtctagatcgatgcagaggatggacggtatgggccgggtgcattaggatcatctataaacttctctcgcaaaaaacaaacaaaagtatttaaaggatcatctttaaactgttttgatcaaaattcggtgattttgagagcaaacataagaacagaatgaaacaacaaatttttttttgtcggtagtacagtgctcagtttgacgctactgttccgtactaacatatatatcagtcgatctcaagaatatttgcgattgtgcctctcctgtaatgcaaaggatccaggtccccctttcagcgttgagtagtcatgttaatggttgattgagtagcaaataggtttccggttatataaaattaatattagcgatgctccggtgctctttattggtattattatactaccaagtaaaaatgatctgaaccttttgttattaaaggtaaattggtaatttactaatataattattagggggtaactttgtcatttatgtttttttttcaggctagatcgatatgtggttatccattgtgctggcatcgctcatatttcattgaaaaaatcaaaaaaaaggaaaaaagtttagccaatgctaaatggcgattataccctctacacctttttttttacaataatatcccttcatgtttgtacttaccattaactataggatggtggtataaatagatctaaacccttcaattgaatgagatcaaaggttaggattgttttttaccatcagtaaaaagcattgtggtggggctcataaaatatatatgcggcaagtgtctatatgaaagaagggaaacctatttcaaaaaataacacattttttacaatttgagctgccttgcttacgcgctcatatgtaagtgtgtgtagtcaccaagactaaaatacatgcatgcaaatgttccaatgattttcacatagacaatccaatctaaatttacgcatgccatgtttctatggttttcaagtagataagtgattttcacagtatagtttaccccagtagttcatgcactactaaaatctagtagtactactgctactaacaaggtatatataggggttaccacagcacaaactaggaatctttgctagggccaggtaagtgctaacaatagcattgaattatctcccaaaaaaaaaacattactgtaccattgaacaagagaaaggatgcgatcagtgtgcagttcaatcacttgggcagatatagcgcaacttgagcacgaaagacaaacataattattggtgccaagagcctgggcgcaatcgttgggccaccccacgtgccacttgaccctttttttacacacccccttctaacataaatacaatatagtatataaacgtgtatattttaagattatgaatctaaatagcttcatattcatattcataatattaaaaatatattatatatgtattaggttgcacatatatattgtgacggaaggagtatgacgaagggcctgatcgagagtgagggacggggaataatccctctggcacggaaaacggagcaagtcattagcgcgtgattaattaattattagctattttttttcgaaaaatggatcaatatgaattttttaagcaacttttatatataaacttttttaaaaaatatattgtttaacagcttgtaaagcgtgcgcgtgaaaaacgaggtggtgggagcagttgccagcgggaaagagcgcacccgaaattgaaatggttgatttaacacccactttttttcatgacgtggcaaacaacaagcgctgattttaccaaattaaagttgctatattagaatacgcgtcataaacaaatcgttctcaagaggaaaagtggttaagcacacatgcggagcccataacctatataattaataaaataaataaaatgggttagaaagctactatcatatatatttggatcggagccattggacaagaagtattcttacagaaaagatcattgtatttctattttctacttttggtgggaactcggatgtactgtccccattcttagatagaagatatttttataataaacagatttaaacttgaaaaccactaatacatgcaaataagattattaaaatttaatatgtaaaaataacatgattactagtataatctagtatattagctgcaataagcaatttattacaaatataattttagaaataatataaatatacaacagaaaaagataaccttactgaaaggaactgaggggagacaagcaatacctttcaatgttgcaaaaaacaattcaacacatattttcttattgccatattgctcatcttgcatcgcatgctttctttgctttcaggatccccctccttccataaaaaaaacaaaagaacaaagcatccccctccttgaaacatgaaaaatattgctcattttgcctgggcacattgaaaaaataggtttatttcgggttaccaattagtgtacaatattggtaaatatggcgttaccaattaataataaagccatttgtatatgaaaatttgtctaatctcatatacttttatttccctgtcttttagctggctctctattgttttatacgatggcatatatagatgccatatgtagtggtactgcgctcatggcattaacagccaagagactcctattccacagctgtgtatatgcttacttttgtatgtccagattcatatagaaaagttaacttacttttatatggaggaaatagaatcttttgtgattctttcagccctttagtatgttagccttttcttgtaatttttcccaccaccttctcttttttgtaagaataaaaacacattgtttgtgagtcttacaataatggccagatacgtaaacattttcattatttaaaagagaaaaataggtactaaactaaaaatacgaataaataaaaagtttacatgccatcttatcttctatgcgagcacttcagagtacaagtatttttaggattcaaaatttataccacagtataagtattcataggacattgattcctgcacgaaatctaaacattttcaaccaataggaaagaaaatctacttattaaaagttcaaccaataattaagtgacagaaaagaactttttttcttcttttttgttaaataatctaaaaattaatatttatatatattacaaaacagtcaagtactccctccgtcttattggatatgacacatcttagtacaataaatctggatagaaacatgttcaaatttgttgtattaggatacaaccagtattagattggttctttataggacggatgaagtacaaaggaaacaggttgtttaagttttaacatatggcggtgtacgggcattgactctggccgtggcagcatttccagggagcaaagctactactaggtccaacagcagtcttgagctcgcgatctcggcctgaccggctaaagattacgaggtcgggaaaaaggctggagcagtggccagccgctgccacttcgactggagtttcatatcacgagcttttggctggctataggctaccagctcgatctccatggtacagtcgacatgcggtaattaagctacgggctcacggcctgctgctctctctctgctctactgcctctcgctgcagctgcctgctactgctgcgaggatgatgtatgtatagtccgtgcagtcgtgcacagagttacgagcagaaagtggggcttgttgctagcgagcttggcgatcgagacggcgaacgacccttgcattgtcgatctttttttagatgggcaccatctcgatcttgcgcgtacgtgtgcatttaggactctaccaacaaaaactatatatactcactatttcaaaatataataacctagaattaatttagatacatcctaactagtgctatgaattatccaattctagattgttatattttaggatgaaggaactaaccattagatatcacctactactaatcatctagtattcgattagacactacataatacttgagtagataatggaataaaattcggtctttattttaagatcacataatactagtagtattaggttgatatattttggaacggaaataaatatatatgtgtagcaaccgttttattttttttaaaaaaagtttgaccacgacgttgtagctatcggtgccgccatgttgcagatgtattttatgtttcattttgaaggtttaaatgattattttatcgacactttccatagtaagatgcatagtacgcgcggtaacgaagatattctaaaatataccattttgtgcatgcatgcattaaccacactttattattcccaacatttttttcctacacataccatgatcattttcttaataattttgctacacgttgttgttgttatctgtcaacatcgcatctttattttgtgcgctccatacatgaagtcaaatatatgtaacttttatctcgattactaggactggtgaaactatgcagtttttgcaatcaagcctttctactacttaatttggttcaatcaagctcctttaattatctatcatagtcttcccactaaagaaattaacaaataaatgacagttgacatactggggttattccaactcgatcataaagtggttactctcccgtcccaagatataaatacttccgacaattttaaaaacaattaaataacaacaaaagtaaaaaaactcattaaataggcaggataactcatgattggccagattgtggggaccacaggataaaattattatttgtgaggttgggtttgttgaactccgtgagttttatattttgggatagattaaaatttaaatgtcagaaagacttgtcttttagacagagggattgttatctaaaattgttagggtctccttagatccaagtatttccattataaacagtgagtatatatagctcattcaaaggtccaagatggatttaaagcattcaaggtcatctgccatcttttcttgcaagcagtctaaataattaaaaacaactgaagaaaataggaaataagattattgtgttacatatgttttcaaaagaaaaggcaaagatcaaatttgatctacacatctattttgcaactctgattgtacttttcatggtgatttgttgtctttgtttctccgtgtagaacaaatttgaccatgtttgcagagggatatttgacacaatcatttatgttgtttaccttttaaatttttttatataattatctatacctaagttgtttgcctaggctatatgatataatgatgtaacaaaggatgtgcctagggggacaaatcttcccgtccacccacgaggacatgcaagaaatcagattgcgtttggtttgaggaataagatgggatgagttgggttaggtcgaacctatttttcaaggttttggtttacagataggtggtgggatgggattgtctctggcaaagaatatttctctaagatctaagttggcgttatccctcaaaaactagcggaccaattcaacctacttttctctctattgacatatgatccatcctttaaaaatagaactaatccatctctcataccaaacttttttatcggataaatgtgatcaacatataaaaaaaataaagttatgctttagggattgtctcgtggtcggtatggattttgtgcacaataaaatgaaatgctgagttgctagctgattgctgattgctgaggtccctgagcgcaggcaaaagcgacaaccggagatgtgtaatgtaaccatatgcattaatcacaaagctgttttattccggcgagaagaagtaaaaggatctctgcagcagcagctttgcaacagtttctcatggtcatcttgagctgtagtgtttcctgaccgacgatcattaacgtacatgagcattaatccctctcttcccttcaggctcactcactccctgccgacacatttgttgccttttggtatggacctgacctataggagcatgcttgtgagagcagagacgctgcagagatgggtttcagttcccggtttcagttcccagtttcagtctcggttcctaattagcaatccgtagaggagcataaagggatttcttttgagtacaataagaaactaacgtagtacgtacggtgatccccagtttgcacgagagctagctgctcccgtatcaataagaaaccgacgacgttcttgaaatcaaagacgcattgatcgtccggaaaaaaaaaaggaaccaaacatgagtgacagggtggaccagtacgggggtagctccgcgaatccagaaaccccacaaagacacacgcatctcacgatcaatcaccagggattccgcttgcgtcgatcaacagtgacggcaaagcttagctagagtccatggtcactcagggccccggcaccaaacaatgcccccaatgccccaacgacagacttatccgagactgatggagctcgatcgatcgccacaccgtaccttggcccttggacacgggccagtttgtcagctgtgatgttctctaatcactcaaagtgaacgcgtactgtacctggctccactgattttcagtaaggtttatcttttacggctctagtttttgcttagataagccaagtcctttcgaaaagcaatcacaagtattactgtgcgctaaacgctagccactaagcccagggatagcggtgcacgagcacgagtagccatcaggccgacgcggcagcatcccccggacccgggacccccaccaccgatccgtcccctagcaagtgcggatccctttcgccgtgccgcgccgcggttgcagtcgaggtgaccgcgtgcggctgtttgcagcgacggcgctggtatccacggtgcggtgccgcgccggttcgacgcacatgaatgattgatcgatcgcgtcgcgccgcacgccggggggggggggggggggcaaagcagccagaggcggggtgcggggcgcgcagccgcgtcaggcgaggagaggaccagatcgccgcggtcttgtggcggcagactccaccggatgatggggtacaagacctttatacggatttgacaggataagggagggcagtggatagggatcagtgcagccacaatcgaagaacgcaaaaaggaacaggctccggctccatggatggacatcgttgttgcgtgcgctacagcactagtacagtactgtggcgcagtactgtggctggtggtgccttcggcgtatatgagcaacaggtttgtattattgcatatgatcaggactgatgcaggataagagtgagacgagagtccgcgtacaaaagcatgtgctgccgtcttattaccttggtagagcccgctcgtcgttccgagggaagcacagctgcagttttcgtctcaaaaataggcgtatattacagcaggcaggacagcctttaataaatccgtgcaatgtgcaaatactttatatctctgaaatgtagcaagagttcattagcctgaaagtgggtggaaagtacagatttatatagtattcctgaatgaaaaatggctgttggaaaatggaaacccaaaatgaaattcataattgatacctattttgactatctggctggactattgaccctcgcctgtatccactcaaattttagaaagagagtaatggtagagctatctgtaaaacaatctaacaaaaatgatcgcatgtaaaatctgcttgaaattaacaatacaagcaagggtgcagagcacttcttccacaccccatgtgttgcctactctgtatctcttacccgagcagaagtgctattgttgaatctttaggactggaaaggcaataacatcccttatactcgccgagttggtcaaaagcattactagtcggtcgattccaaggccctaaaaattgataattccagataaattagtccacacaaaccacatactgacatttttactttcaagactgatagcaagttgaaaatactggtctttcaagccttactgtagaacgtaccattccggaagcaggtggcattccgtactctagggaagtcaggaagtcttcatctaaggtaacttcatacgaaaaatcatcttcctcgtgtttaccctcagtagatttgacctccttggtcattgcagcacgcttagcattgtgctgcttaatttgattttcaaaacgacccctctgccaccaaaagtaaagtggtcattttaaactctgtaaaggccagatgattcaagacatgataatactcatgcataatgatttttagttgtacaaatgatatggataaacatgtcgtgccaactaaggatataataacccttttccttccccaattttctggtaaggtgagctcttagggggcatgtttgaaagccctttttaagtgtaccatggtgctgcattatcagccaaccttctgcatgttaaccaggtctggcctctgcatttcaagtttatcaaaccctccaaatacaagctcaaaagacaaaagcaacgatgtaataataccaccagataatacatgccacattaattcttgactgcaaatcaagcattttttaaccagccggctacttttttaatccaaggtttccaaactactaaaaacaaagtggcagtggtaagtgcaactgaaattttggaaataccaaggtgcttcgcggtttgagcatagctcaaacattgtatagcacacaatattttcaaagctgactggttagttggtgttgacgtattcaagtacttgcacctactaataccaaatttgtaagcttttgccaggcaatgcacaggaaaattgtactaccagagatggtttacatgcattaagaaaactaggcaaatatacctgatcaattgggtctgtgagctcagaaaatgcattaccaatctcacgaccacatatgaaaagttcaaatcgctcggtaagaccagcatacctacagcaagagaacataattattatgataagtgcacagtgattgaaactgaagtatgctctgaataccaaataagatatacaaataattcataatcttgaggtaatctgttttgagtaacagtattttgacagcaatatgtaacaatgcatccacccagagaaaatatatggaactttgatcagaacagcggcatcaccaaataatccttttaaatatgatctcaaaaggtaagtacgcagttgatatatggacaattttaagggatatgtttgagaacagatggaccacatctagttaagggatgtgcttggtttgatggttgtctacatacagcctactggcttcagtttctgaaaggcacaaactcacactggtatcaggttgaatcagtaaaaaaacagtaggtagtgacaatggaaggtcagagagatttgttacattcatgggaacggggaaaagtgatgataacttaaaagaagtcttagttgtatctgttctatcaaattatatttgtgtctcctgtgtaacaaataatcacagtaatcacggtactttttgcagaaaattcagacgaagcagctcgattcctgcattccaaatgggccttgctgactgtgatggtgagacctttagaaaagaatcaaagtttaactaccgttaattgaataattactagtctacccagaagctaattctgcaaactgtacattcaatttaacggttttacttgagattggttcacttcatattcaaagcccaggtgagcaccgccgactgatacaaatgtagttcagagacttgatatgtgtcagtcttatttctcgagactggaaaaatatttttacaagcacactaacatgtaatctacttatctcatactgtagtttctattcataaatatgtctgaagtaacaaaaacataagaatttttttcccaaggaaaatttcactttgggccaccttttattaccgttgtttcgttttggtccaccctttaaccaatgttttcactttggaccgggtatttttaccgttgtagcgcttcggaccaccctcaactcttttatccttatacatccaacttgtcgtatgccaaagaaatgatcttacatatagttgtgagagttcattgatgagtaggaaccgacgtactcgagatttttcatatgcttgaaaagagagttagggtggtccaaagtgaaacaaaggcaagattacccggtccaaagtgaaaacattggctaaagggtggtccaaagtgaaatgtcggtaataaaatgtggcccaaagtgaaatatcaaagcaaatgaacatttacacaatagcagtaattcaaaacagtgtctgttaccaaattaataattatcttgcaattacctcctatgtggtttggccaatggtgatatctcaactgggtagtcaagaacaaatgttggctgtaccagacttgattcaacaacagtctcaaagacctggcatacgatggaaaattataaaattgttattcttcatggcaaacaattagctcaaccagactggtaaaatcactataatatgcatgatatagagtgttgttaacgtgaattggaaagtttgcagcttcagcaggcccaatataaatctgatttcacttatttacctaccattaccagcctagtatcctacttgaaaatgacgttgtgtttgaaatgtggaagttcactaaatttcaaagcccttaaactttgttagtaaactcctttatctatatgaatccataaaccaacagtagtatattagtttaacttccaaggtgtatagttatcacaattatttgaaaccttgcaatttctgtttacaacatcagattttgaaaatgatggttacaaggtctgctggcttactgtaagtaatcatgccaacattttgcttgttaaaatgtgccatatagcttcagtttgcatgattccagccagagcatcgggcatttatgcaatgccaaaattctcagcaaaagcatcacacttaggatactgcacactttatcagagtttgggttcttgaaaaacttattcttttgagccaacatttgatcccacctgatactgttttcgagcgtttgtttcaaacctacgtctggggtttggtgatgataaaaggtgcccttgaaatgctgaatgtctaaaatgaactctcaagtccaaaacttaaggaagacttctcccttacggaaattttgaggcagcacccgagaaataaataatgtcatggaaaataacagctgagatacctcattgagaacatgtccaacagatgaacaagcttgcaatgagatattctcattgctctctgttttgatccctcttgcagcatttttggcggattcaagatcttctccaaagctattaaagtcaattccagttgcttctttgacaagagaatgcatggtttccctcctccatggtctttcaagggagatttcagttccctgtttggtattaaacaacaattgtttatcaatgtgaaaagacacaagagtaatacgtgagtgtgttccaggaaattaggtagggaaaaggtaaactatagatcaaaaatcatatgcacacacgatcctcattcttcattttgctccaggatttgcttatgcaccattttggtaatttctgaaaattcgttgatggcacataattcaatgaaaaattgagaacatgcttgtagcaagtggtaagtcctccagttgtgagcctaccaaccagggttcaaaccctggttctcacccaaaaaaaaaaaaggccccttgctgtgtgttcccaagtacaggttaagacatggcttgtggcaactggcaatggattacctgtacgggcaagagccggctttcggggccatttcttgaccttaaatgcaatgcctttgggatgtctctccccttgggtcaggtttttcaatgaaaaatacaattgaacggttccatggacctgacataaccttcatcctcccaaaccactctctaacatctacttctcattttatccccttctatctcctgagagcaacactaccacctgtttctctctccccctactgcgtactgctatcatagcctctaccattttttgctgctgctactagatcagaccatgccaacctggcaaccttgatgccaccaaattcagccattcctggcctcacaccaacacgcgtggtgataacaggaaacaaacagcaacaagcacaccaagacaactgccagcatgaagacagcgttgtcatggattagtgaggaggcaccattgccagccattggcactggcagtggccataagaaatggcatctgtaagtacaagccagggcacaggaggtgtcttcacccccttcttccttccaatcgcctttgctgtagcgctctccatttccactccaggtctggaggcctcacactgggttgaccttaccgtgtactccttgtcagagcaatttcatttaatatgaatagatacctcctcgagcatgccacctctcacttgtcagttgtagtatacaaagcaccataagttgtttgcgaacagtacatgtactttgcaacatacttgggcttgcaggggctaaacattgtactatattttgtattatactgtatattgtgtagtaaatgagaagtaatacatttgttgttgcttgtacaactcacctctagagttgaaaacaatgaatacttgaatagtagctcaatcaaaattcaattaatctaaaaggagaaaatgtttttgatggggcactttaatttctttgatcagacctatgatttctaatgtcaatggttttattttggtacaaatttctagagaaatctgcaatgcagattgttttaggaccagaaatgttttttttttctggcatgcccaagtgcctatctgcatatggcttccagaccaggaaacaccagtacggaagcaaggtgtggataattgttattgagcttggaacagattcagtacaaaagaaaaataatagaagcaacaaagatggcatgattctgctctgatatgtgtccagatgatccaaattaataaggcaaaaatgcattgcaatatatatatactatatactatagttactaacttactatggtagacttaaagactcatacctgataatcaaccctaagtttgccatgagtagccattgcacatctagtaacaatttcttcagccaaattcatcatgctttcatagtctgaataggcttcatacatctagcttccaaatacaaggcagtgagtcagacctcacttagagtagagcacattatgcaagaaaatggaataaacaggaacatggaagataaaaccactaggctcaacctacatggtaagaacaaagcaaacatatgatatgcgggtaagaacaaagcaaacatatgatatgcacgtattggtgaaaaagacctcaattctttacctcaattgtggtaaattcaggattatggcgagtggaaatgccttcattccgaaatattctcccaatctcataaactttctcaagccctccaacctgcattttttttcagtagtactaaatttgtaaataaatataaaatagctaaacagtatacagttcgcaaaaaattatgttatggtaagattaacatggcataacaagcatatgtgatacttccatttcgattagtcaacatagtagtcaaatctgatccttctgtactcacaggaatcatattcactactatgttgactaattggaatcatattcactactatgttgactaattgaaatggaagtatcacagaaatgaatacagatacagagcaggttaagaaaaaagagatagctgccaaactgaagaataaaaactgaatagtaacctcaccagcatccttttcaaatgcagctctgttgcaatcctcaagtaaagatctctttgcagtgagttatggtgggttataaatggtcttgcttcagcaccacctgctgctccctgtttagcccggttggaaaaaaaaagaaaaatgaccagacgatattaatgatgaccaataacagtcaaataatacaaaacaaacactggggcactgggcaagtccattttaccacccccccccccccacccatgctgattaaaaaaaatgattgctaagtccatgtaagctttaaccacaaaaccatggtaatctatcaaaagttcaaaaccagatcagatgacaccatggcttgatgccaccctggtttccaattctagtgacctagcatctgaggtggtctatgtgctgagtgctaacttggtcactaatgagtcaatgagtaaaaacattttgtattttctacctaattcccttgtgccaaccatgctaagccaagcaagagcactgtttacaaaataaaaatggcagcaaaaaacattttgcgtgcagtgacacattttcgcttgcctgagcaagcttaaaggacggcactcttcccttgtgttacactgtgattagtgttaccacctgccaagattaaaaagcatccaacaaaaacaatttcacaatgatccctgctacattgtgcgtacatgtccttggaatgtctatgaattagactatgtaagtctgaactgaatttagagaatctttagatgtatttgctcttatatgtaggttttgcgaagctcagattgagtataacagattggagatatgtactgtacagaagacttgaaagttcaaagtacgaaacattgtaagaattggacatggttgtatgtccgtttacaccccagctcctagctacgaagcagaagaaaaattttagagaataccaccaagtaaactaatttatctttagaggacttcaacgctgcagcaaacttgcggtaatctcagccacatggttgtttgtgatacctcagttggataagagcttcaaacacaaaatgttgtcttcaaagaaaacttagcaatagcactaaaatcaaagctaattgtccataaaaagtaataggcctaaaactttacccagctagctttttcctgaacacaggatagaaaaagaacaaacatgccaaaaccaggtcagcggagaagcctcgttttatgtttggagggtatatgtatattttaccgcatattttgatatgttgacataaccttaagttgaaagaggaaaactaaagttttgcaccctgtttacatatgtatcacgttttggatcgatacactctccagcatgaacccgtgacctttagtattgtataaatatgttattgaaaaaatattaagtacattattacagtattatataatatcagaatatttttatggcaaatctaatggtttcagttacacatgatattccaaataccatttcatatatcggtagttaaaagtaaggaagatttagtaaaaaaatgtcattgcgtcatacattttcaaacacagagctacataccattaatctattctgtctatatggtcccaatttctatgttaactctgccttgtttcagattccatgagaaaaagtggataatcccagcattatcctcttaccaagcctagcgattagcaatttaaagaatatgcctagagcacacctgtagaactggcgtttcaacttctatgaagccaaatgattccattgtcttgcggatttcagatacagcctaggaaaaaaaacagttaagacaaactgaaatgtagagttggtgaatcacaaattatgcaatctcaataacgaataataaattgccatccctagtactatttatcaaaatgagagctttgttgaaataagggcatagaatttcccatcccacaatttccctattgcctcctgaacagaaatgttgttctgtactgcataagattttacataaatttaaatcccaagtaaaataatcatttaaagccaaacatcataggcaagtcgacttttcataattaattactatctagtctagttcacaaatttgtctcaaccaaaactaaaaggtaattcagctccctcatgcagtcaaaatcgctacctttgctcttgttcggaatacatcagcaacctcaggatttgcaatcatgtcaacatacctatcattgtacaagtaaagatagtatatgttaaatgttggaacaaaggaataggagtttctagctgatactaaaacaatagtattaatactcataataagtgattcggatttaatcaagtacaaaatgcttgtatgtaattctcaatttagacagcatccatcatgatcatgaaacacagggaataaccaaatgaacgcaatagataaatatatagagagaaccattgatggttataagccataataggtggtaacaaggtgtgattggtagtgaaaatatgcaaatactaaaaacgactgatacacttcaggtatattctaagagaagatttgccacgcctatactccgtggggtatgccagaggtccataaagcagaatatttagctataaaataattagaataacaatagaacttccaaagcagattaatggaacaagaaacagccaaataaaacattctgaggtccaaactcattatagatgcaccgattgttcctttacttgaagaaaaaaatatataaacacaaaataaaagctaacctttggcgataccgcttgtccacatcagttaagccatggtacttatcaggtagtgggagtaaggattttgtaaggatttcaaagtttttcacgtaaacagatagttcccctgcagcaaagtgcaccaagtaaaataaaatcataagccactaaaagaacaatagtagatgctgaattaatagcattaagatataatgatttatcactaattaaccattatattgataatagaatcgaaataaattaaggcttacattgagtagcttgagcctgaaagtgactaactcagcttgtaatacttgcagggtataaaatacaaatcttagccattcatggataattcttcacaattctaatcctataatcgaccatgtccctagcacccaaggaccaaggtccttcatattttgtagcattctatcatctttctgattttccgttctttattgacactccttaccattgattttccttttcgaaacagtagtgtgctggtaacttagttgaacaatagtcagatgagtatgctaggaaaatgctaggaactcacttcaatttacacaaagaatgattttcaaatggggagccaaacactgtgatggtgatacaagagtctgactcgcaattttgatgtttaaaatcatgaaggcacataatcatagaagtctacttctaacaatactgtgcaatgctgcaaacttatgtcatatgctgaaaagcagacttctaagtgtcatcacatgacagaatagacagtagtaatgcaccaataaaaggatttattttaccaaacctttttctgtcttctttatggaaccatttgcacctattatatcaccaatatcaataattgtcttcagttgttcaaactgttcctcagtaaggctgtctttctcacagtaaagctaccaattgacaaaaagaagtgttaaaaatataacaatgaacaagaaatgtttgtgaacaactataaagagatcaatgtaagtttcaattgataatagtcacaagaaatgcaaacataaacttcatggcatgatttacagcactctttcattctttatgtaaacaagcctagcaccactgggaagatcaagacaacaagttcatccggaataagacagccttgactaatgggtttggtgccttcctcagcttgtacataaaattagcttgcaaacgtaactataccaatcaatgtattcacgtaaacacaacgtattcccatatggagcagcagaagtactatgaccacttgatgaatttacatatgtaattaagagcactaagcccaatattaagttgaccgtccaagcaaaacgcatactaattcaaactgtaagaatggattttgattggaacgtggtaaactggtaagtggtcaacaacattcacatacatatatcctaagctgaatttgaaaatagtcggaatcaagtgcaaatgttttgaacatcaattcgacaataataaaacaacaaaccatcgtgattgttaagtttcagggttcaccggatcaaaaaaatgcttcatactcaaatattatttgatttgtcaaacaattaaaacatactcacatccatacatgcatgctcagtttgtagctactgtgctatacttatttaggttgctggaaaaataaaaggtgttatagttgttttatagatcaaattaaggttagacaaaataatgttcctattcaactgccatatatctcccagtagtttcatatttttggaacacggtaatattcgtctgcgacatagactaaaaggaaagcagtttgccaaacgctgaaatgtcttgccccaaatgagattatcacaatcgactgcaatacgaaacagaacctcaagctattacaatctagatactccctccgtttcacaatgtaagactttctagcattgcccacatacatatatatatatatatgttaatgaatctaaatatatacatatgtctagattcattaatatctaaatgaatgtgggcaatgctagaaagtcttacattgtgaaacggaggaagtagaagatatcactagtggaatgggaaagccacaactacaattataaaacttggcactagaatattctggataatatgtactcgtatctgatttacagccctacgttcgatttgcaaaaccacgcaactaactcatttgaaaggaactaacctgaatagtcccggaatcgtctcttacggtcataaaaacaagctttccaaacgctcttcgggcgacaatcctcccagcaatggacaccgccacgtccgcgcagacctcgccattctcgagatgggtgtacccatcctgaagctccttggtagtgtgagtcctgtcccacttgtacgcgtacggctcgtagcccttccctctcagctcctcaacctagcaaaccacacggcacaagcgattgatcccgatcaaacggatagcggtatcgaacacagattgggggagcaggaagggattggcgaggagtaaaacctttttgaggcgaatggcgcggatggattcgcggtcggaggtggaggacgaggacgaggaggcgcttcggcggcggcggtcctgaggtgggggcgggggcggcttcgtggtggaggcggcggccggggagcagcagcggacgtgggggcggaggggcctcgccgctggggcggccttggcggcgcgagaggccgcgaagccgaggagattggaggaagccctccacgcccgcagcgcctccattcttccgccctgggcgtcgcggggggagcggatggattcgttatcttcgtgggggttttggaggaaggccgaccaccgtaggatttctgatttctctttggtcgcgccggtcacggttgtgtacagtcatgtgctcctgtagacttctggccctgttcgggggaattgtactcttcaaaactagccgtaaaaatctagagtagctggtttcttacttttatttttttattctataactacaacttcttagagcatgtggagtgtatcatgcatgcatcggtactaaaagtgggacccatgtcagatatagcacctcgtaagaactgatgcagtgtataaagttggcaaaggtacttattgtgggccccacataagattaaaataagttaaacaaaacccatcatctctctcctacatacaggccaaagacacaatttgtctgacgcgtgggtcctgtcatatgctctttccagtagaatcgggtcctatgactagtacccagctcttgcttgagactggctaaaaaaacatatcacagtgtgtggatgcggctctatcctttttctctctcttctagtacctcctctaagtgcaacactgcgtatgctcttagaatctgagtgaaaatctaaactatttagacgagtttctggcagctgcagcttccagaagaatctttagctgctagaagtgtccctaaatggaccctttatttgtttcgaatcaaaaagacaaagaagactacatttgttttcaaattttgaaaagaatttgggagagaaatttgactttcttttctatttttccataaagttttagaatcttgcactcagtttatattattagacgagcaatatgaaaaaaaaacttaaatcatacagaaatatagtacttcctccgtcccagaatataaaaagttttagagttagacacggttattaagaaagtaggtagaagtgagtggggggagggttgtgattggatgagtagtggatgtaggtgggaaaagtgaatggtggaggcttgtgattggttgggaagagaatattggtgtagaagttgttatattttgagacaaatcctaagggctaaaagttgttatattttgggacggagggagtattattttaactagcaacttctcccacgcagttatgtgtgggtgatagattttatatgtctaaatgattttgatacatgtctcttaacttatgtttccatacacataattgtggttgataaacgaccggtttttaacaaaaaaaatcggattaatatatccaaaagataactctcgttttttattttcacaggtataattgtacttaatctaattttaatgtttgaggctattaacttttaggcatatctccgatcattcatcttattgaaaaaatatataattattatttgttttatcattaaagttacttcatgcataacttatatttcattatatttgcacagcaaatttaaacaaagacgaatgatcaaacatatatccaaatatcaatggaaccaaactttaaaacccaaaggaagtactttatatacagtataatttaaaatatttgatatacaccatttagcttgttatgttttcattggcacgattatatttgggctttcattcaattttcagccttgaatcaagatatgttactttatttggaccatttgcaaaaataattgactgtggtttgcaacatcatgttatcgacggtgtatttagttataataaaaaaaatctagtacaacttaattgcatgtaaccatatatatttaggtataaggaattatgccattcaaatttgccccaaaatataaggggttttgcaatcccaatacatcaatttatttctcacttactaactttaatactagtatattctctacccgtcactcttttacttgttcatttctccactatcaccttttatactattttatttttctaaacatcatatttgtaccatgacttgtcctttcgccaattcttcctttttaaaaaaatgacaataatactttatattacgggacaaagaaagtatgtgattggaccattctttagctttaaacacctacttaagtttcgctactgcatttttagataacacttcctcagttctctctacaaacttgcaaccatgcagaaattcagtgctcattgttctacgtgattgaacatttgaacccccatcgttctcgttctaagttaaagttgcctagtggctgaaaatcgctgcaagcctgcaactatctctcgcaaaaacgtgcagtcagcgtggagatcggatcccaatatacgccgtatcactgaaactaatgtttctagtgctagtgctaagttcaatctgatcagagtcagcagccatgctcggtgatccaccgagcaatgccgctagctcgccggagttgggctgcccccatgggtgcagcgacagcttccccagcctgtcgagctcctccgcgacctcccgcatcgacggcctcttctcgccggagatctccaggcactgcttcgccagctcggcgacctgctcgagcacctccatgctctgctcgcccttgatctgcgggtccaggatctcgccgagccggccctctccgacggccaggaggaactgcgacgagaggtacttctcctcctccagctcctccaggttgagcgccttccggcaggtgaggagctccagcagcacgacgccgaagctgtacacgtcgctcttgtcggtgagcctgcacgtccgcatgtactccgggtcgaggtacccgcaggtgccctgcacgaacgtgacgaactgcgccgcgtccgccggcgccagcgtcgacgccccgaagtcggacaccttcgccgcgtagtcctcgtcgagcagtatgttggacgtcttgacgtcgccgtggatgatgggcggcgacgcccacgagtgcagatacgccagcgcctcggcggcctggtgcgcgatcctcacacgcgccgcgaacgggatgcgccgcgccgacgcgccgccctcgccgccgtggatgagcctgtacagggtgccgttggggatgtacttgtacaccagcatggggacctccacctcgaggcagcagccgtagagcttgacgatgttgcggtggttgatctgggacaggatcagcatctccttgccgaactccttcttctgccgctcggtggccagccggcaccgcttgatggcgaccacggcgccgttgtccttggcgatggtgcccctgtacaccgtgccgttcccgcccttgccgatcacgttgcgctcgtcgaaccggttcgtcgcctgctccagctcctcctgggtgaagagcgcgaacgacaggccctgcctcgacttcatctcctcgaacagcagcagcccaccgtgctgcctgaagtgctccctcttgatcttggccagcctcctcttcgcgtggatcatgtacacgcacgacgcggtgattatcagtattacaactccgctgctgattcctgcagtaactcagttttgtttaatttaggcgttcttcacaagaacattggagatgcgtatgcgtggattaccaatggcgatcttccatccgagctgggacttgttatccccgcatgtgccgttgtaagcgttgcctatcgtcttgtcagggcaagtgcaggtgaatcctccgggagtgttgacacatgtgccaggaacggagcacgggtacctgaacctgctctcgtcgcattcgttgatatctgcagaggcaagaaaccaaaatggttcatgggctgaacggcattggcacaccggagcaacgggcggcctatgtggagctcaccttggcagccgtcgaggaggtaggggttgccgtcgtagccggcggagcagttgcagaggtagccgcggccacggccgtacctggagtcgacgcactcgctgttggcgctgacgcaggcgtaggccgacgcgttccgcttggcctcctcgcacgtcttgttcccgatggcccagtcgagcaccagcggcagctggccgccgttggacgccatgaactcgtcggtggtgacgtacgaggcgcggaagtcgaacgccgaggcttcgaccagcacggcgtagctgcagcggctgaacccggcgatcgccgacgtgttgaacttctcctcgaaggagacctggtacccgttgaggccggccgggatggccgtctggcagcaccccacgccggcgcaggagccgttctccttctccagccggcccgcgccggggcacatggccatgcacccggtcatgtaccggtcggcaccggcggtgccgttgggcgagaggatgtaggcgagggagttgcacccgacgacggtgaagcggttgagcgcgtcgttgatgcggaagttggtgatggacatgtcgtaccaccagttgctctgcccgttcatggcggacgtgctgccgttgtagcaccacgggttgatggcgctgtagatgcgcagctgcccccgccgcaccgacacgtccaccacctcgatctcgtagttgtacacccgcagccgcccgtccgcgctgcggttgcagctcagcacgaacgtccagtccccggtctcgaggtggcacccgctgccgacgccgaacgggtacgggatctccacgtcgccgcaccgccgcaggcacgtctcgctcggctgcatcgccgccgccgcttgactcgccgacagggcaaggatgatcagtggaagaagcattttttttgggtcgtgggtaaactgtcccggacgagcgactgttaatccgcgctagtcacgttgttttatgcgaactaatcgagatttggacttggacttgagtgaaaccaaagccgaggtttgaagagatcaaatgaaaaatatgtccccatttgcacgcgtgcagacaccgcgcctaaacatgacaccgatgggtgtgaagtttttcaaaaggggccttaatctgacactacatgatttgttggctgatgcaggtacgttgatcttaagattcaagctacaagagtgggtctcgaaaaggactgatctcgatctagatactcactgcttcaaaggattgtttattgtccatttcccctttacgtatgaacagaagccagacatgtattcctaaaagattcttaaacaggaacaagtaatgctgctatcgtaacactgtttgacagattcttaaacaacaatacgaaataattccggcaacgatcaggctagtcagggtcaggtgcggtttcgaactttagatccccagcaagacgcaggtgcacctaattattcgtatggacgaattaataggaggagaattattgtttagataccgaaccacacactagctaggactagatggcaccaagtgcggaacaaaaattcagacaactgactgaaagtgtcgtaatatcgaagtcaacctgtattctcactggcggagcttgactcgttcttacacccggttgttggagctatgacctagctttgataacagttgttagtgggttgaaatggaacagtctcaaagggtacacatcgaacaggatatagcagcattattactatcatgatacattacacatgagttagattcagaaattgtttagttatcgacacggtttaggaaaacagtatctgtaaccgtcgtaaaatctggagttctctgaatctgcacgaaagagaactggaaagatatgtgcttctgcttataaaaatacagacgcccaacaaactctgcagttatttggccctttctcccatccagccaatcgtagaagacaggcagttgaaaccctcaaaccgcacgtgttcatggaaaccaggatgtcaaatcggagttctttgattctttccggggagaacggagttcacacccctgaacgtcacggtatcagcgtcggattctcgagccccagcgagagcttgacaatgtaaaatgtgtttatccgttgtgcaaacgccatcataaactattgaaactgtgcttacacggcaatcgatttagcacatctgctcagtatattaccgaacaaagacagtttcttgagctgacatccgagctccgtcagagtgttcgagcggtgtttcttaggctgtgacgtcctcccttgtccgatctgtccgtttgttgcccaatcagatgaacaactttgacaatggaactgcggtgctctaagaagtaatttaggctttctataatatatgtaaattacttttaggctttattgaatttacttttatatgtctaagaagtaatttagtgaaatctaagaagtaatttagatattttataaaagtaatttatattttttcatcaaaatataatcatgtgagtttttgttataaagatttaattgttataaacacaacggtgtaatcggatcgtaaatcggataaatagtttaagagaaaattttatttgaaatataagtggataaggtcttccatagataaagcggtagctggtttagatctagtcacgtccttgaaattttactttcacactttgatgacacgggactatgggtgcttaaaaaaaattaccgatatatccagcagtccatggaggcaggcgatggcgggtctcgcgccgacggcaaggcgagaatacaaggcggagggccgaggagctccgcgcgcggcggagacaggtggaggaagccggcgccgccggcaaagcgcgcaccgtgcaacagcgtggtgttgggctgagtttataggccgcgtggggaagcaatggcctaatgaagctttcgggtccagcatggatgggtccagattggatcgctgctgtccaatttgggctgcctcttcaggcccgttaggggaaggaacagcccgacttccctgggcgatgtgtcgacggcccaacttggatctgcaagccaatccacggccctgacttgatccaattctccattgtttttatgggggaataagttcacttcgggtccctctatttgtcgcccagactggttttcgtccctgatcgcaaaaccggatacaataggtcccccaacttacgaaaccgtttaaataagattcctcggcagtatttgaccccggttttggctgaggtggcgcgtacgtggcaaatttgactcggccttcatctaacgtggcactgacatggcgcttacgtggcaatttgatccgaaaaataataaaacctatgggacccacatgtcagcttcacatacacaataatagaaaaatggtggggcccacatggaccctacctgtcatcctcactaccccttcactccatcctccctccttcctcctctctctatcccccatctctctctaacggtggcgggcggcatagagaggcggcaggaggtgggtagagcggcggcgagcgacgggtggagcacgacgacgaccactgcggtgtctccgaagacgacgacgacgacgacgacgctctgcccagaactcgcgtccggcctgtcctcctcggctggccgccgcgcgccgaccctcatcgcttgaccgccgcacgtcgcctccggctccggctgcgttgacgagagagagagagagagaagagggaggcgttgtgcctgcacaaggagagcccttccactgagtgaactgaggagccattcaccgccgccaccgccgccatctctcgcgggagctcccggccccaaggccgccgaggaggagagcgcgccggtgctagcgccatgcaacatggcagcctccccaccgcggtgccccctcgtcgttgtcaccgccattgtgtcagcctccgggcagcagcggtagtcgacggagaacggccgcccgaaataccagccgatgcggcggccgccctactctggcggccgccgctccctccccgccccactccggccaccgccgctccgtccccgccccactctggccgccgccgctccgtccccgccccactccagccgcagctggtcgtccctgccgctccgtcgccgccaccgctccatcccgcgtgctccggctcgagacagagaagagggagaaagaggatagagagaggagatatagagagagaaggggtagtgtcctagtgtggatgacaggtggggtccacgtgggccccaccctttttctattattgtgtatgtgaaactgacatgtgggtcccataggttttattatttttcagaccgaattgccacgtaagcgacacgtcaatgccacgtcagatgaagaccgagttaaatttgtcacgtaggcgccacctcagtcaaaaccggggtcaaatactgccgagggatcttatttaaacggtttcgtaagttgggggacctgttgtatccggttttgcgatcaagggaagaaaaccagactgagcgacaaatagagggacccaaagtgaacttattccttttatgggccctgcttgctggagcagggctaggagggagctgtgaaagttgtgaataggaataagtccactttgactccctacatatgggtttaatttgattcatatccctccaccacaataccagaaatcttgacctcttaactattaaaactagtgaaaaaaaggactccctaggtgattttaaatgtagttttcacttacatgcctgtgggctaacatgtcaacatgagtattttttctcgctcttttggcttcgttctctcctacaaaaccaacaatttgctgaaagaaaaattcaaaggaagcaggcaggggcacctcgcatcgataagtggagattggcggtggtccccgagcttcgcctctcgctggcacccgtccttgggttgcatcgatgacgtcggcaacgagatctagtgacggcgagctcctgaagaaatccgtccttgccacactcctttaacactgcgccgcggaatcagcaggggctttctacctccacgtaagcaaaccacgctcaaagctactcgactcacaatgtatggcagcatgggtatcaaaagtgggcccaccaagtaatgtttttccctacttttctggcttgggagctcctctctctctcgcttttctgcttcctatctcgctttttgagccaaagaacgtgtgaccaaagttggtcacgcggacttcaatttagtgggcccaggagtaaacgtggcactggattgaagaatctcgcagacgtggcagtgttgggctgaatgacagatcatcccactgtgaatggcctaattctagagcttgaggccacggggaactccacccgaccaggccaatgctgatttgggtgcagaaatagagacaaaggagagggaggagagcatgaggtcatcctcgagcttccgctctgcccttcgtcgcgagaatgggggagctcggtgacggcgaggagggaagtctgagcgtggcgtcgtcctccagtgagccataccgatgctgccttttgtcccccaccgacagatagatgctggtgaggtcacctcggcaagctcgaatcaaggaggagggcgcgatggcgagcacatggcgggggatggcgagcacatggcggggaggtatttctcggtgccgcactcgaagcatgggaggcgtgacacagagcattggcggagttcggactgttccctctggacaacgtcactcttcgggtccctttgtctagaggattccgatagtggctgccctgggagggggaggggacgacaacgacgctccacgttggggatttcaatagtagtgtccctcgggaagggctacgcagcggggctgttgtgctgctgtgcatcgctaaagagggtcaaagggaagcaggcggggccccctctcgcaaccccgctctaccgccaccttgttccgatgttgctggagaaaggagatatggggaggagacgagctaggctcaaccagtgcgtcgcccggtgcaagttgtgccaggaggcaacgagacctttcttgaacccactcatatgcaatgacgtgtactgggccgccgacccgagccccttttatatatcaaggccgtggggggtattgctgcgacagggtctttggcaccaagacgaaccgcacaacctgccgctacacagtcgaggtggcattgtgtgccgccgcatgcaaggattaccagcaggtggagttgtcggatccgcctcgctacgtctgcaaggaccggttcactggtcatcctgggcctagttgcaacccgacaagtagaactgacctagacgaacatgattgatctatcgagagagagttgaggtaagggaatgaaggtgggagagaagggtgtcagggttacggataaggtataccctctacccttggatatatgctatacggaaatacggtatagcggtgcatatacggacgttctctgaacacgctaaggaaatccatcacgaagtctgctaatggaaaggttcttatccgtataggactgggtcgttactatatcgtgcagggttcgatgtctccgagtcctacttagagaccgcctgacctgcgatataaaagggaccccggggggacctagggcatcgaatcctagagcctacacaacgaccacggcctacgaaaccggatactacaggagccaagtcgccgggtgacgtagtcgaatcaactcgactacgatctcgtcggtactgtcgagttctgctattccctttgtaatatgtggttctttccatataatcccatatcaactggattatggttattacctgctaaggggcctgaaccagtataatctttgtctcttgtttccttgatgtcgtattacgtagatcctcgtaccaacgtactccaataacctctatatccggtctacgggtatccaccgtcgacaaagggatgatatgtgggccctatctttttttaatagttcatgtgatgattgtgctgctacgttagcgaataccatcttcaatattgtcgtgggtgtgattttagacgattttaatagttgaaggagttattatactcgattttacgatcgagggatacgaatcagatacatcatatattttagggagtcgaaatgaacttatttgctgggcataatatgtcgacggtgttagttgccgaatgccaagagtaaaccacggcccacgttgattgagtagatggaaggaaatgtgtgtgcacttgcttttctagtcaacaaaacaaaacaagaacaattttgctatatatttatcaataacttttcttctaaaaatttgtcatacgtaattatagtataattacatcgtaattttcatataattataatgtaacttgtatctaactttcatataattttgaaccgttagatttatttcaagatttgtgcaagctcacagcttccaggacctctattccaaagaaatagcatgttacgacttacgaaaggatttacatgtaagttatgttgtagttattcgcaagttataatgtaactacaccataattgaattataacatcggtcaaatttaatgcataggcagccctaacgacaatgcgtacacacagctagtacccaataatctaagactgtgtttagttcacgctaaaattgaaagtttggttgaaattggaatgatgtgacggaaaagttggaactttgtatgtgtaggaaagttttgatgtgatagaaaagttggaagtttgaagaaaaactttgaagctaaacacggcccaatatacatcatttggaagactctgtgaaaagatgcagcaatcttgtttgactcggagacaatgagatttttttttcgaatggtgacaatgagagatgtcatcaccgtggagattggattcctaaatacgctgagtcagtcaagctgacatacccattgctaagttctatttcagagaacgtgcttggcgatcctctaacaagcaatttctccagctcctcactttcatgccgtccccaaggatgctctgctagcttccttagcctgtcaagctcctctgcaacctgacgcatcgagggtctcttctcactggacatatccaggcactgcttcgctagatctgccatttgttcaatcagttcaatgctctgttcgctttgtatctgtgagtccagtatcccctcgagcctgttctcacttagagctagaaggaaatgtgacgagagattcttctcctcctcgagggcctgaaggttcagtgcctttcgacacgtgagcagctctagtagaacgacgccgaagctgtacacatcactcttatccgtcagtttgcatgtctgcatgtactctggatcgaggtaaccgcaggtcccctgaacaagtgtgacgaactgagcttcatctgtcggagccagcgtggaagcaccaaagtctgaaaccttcactgtgtagttctcgtcgatgagcatgttgggcgatttcacgtctccatggatgattgggggtgaagcccacgagtgcaggtaagcaagcgcttcggctgcctcgtgcgcgatcttcagacgcgccgcgaaggaaatgcgcgacccgtgtcgcccgccatggataagttggtacaaggtgccattcgggatgaactcgtagacaagcatggggacctccacctctaggcagcatccatggagcttgacgatgttcctgtggttgatctgggacagaatgagcatttccttgccgaactccttcttctgcctctcgttgattagcttgcacctcttgatcgcaaccactctaccgtctttcagagtacccctgtagacagtgccattgcctcccttcccgagcacatttcgctcatcaaatttgtttgttgcttcttctagctcgtccttggtaaacactgtgaaggatagtccctgatttgacttcatttcttcgaatagcaacagaccaccatgctggttaaagtacctcctttttacagtggcaagcctcctcttttgctggatcatgtaagcagaagacatgatgattactagtagagctatgccaatgctaacacctgcagtaaagggggggtggttacaaagaaatttacggagctctacacatacatgatcggtagataattacaagtcaaaatgtactagagagcgtatggcgtaccaattgcgatgtgaactccgagctgagatttcttggcctcgcatgtgccaaaataagcgttgcccgttgttttatcaggacaagaacatctgaatccacctggagtgttaatgcaggtaccaggaacagagcacgggtacttgaatctgctgtcctcacactcgttaatgtctgcagaaagcaaattactctgtttctttcactactagtatcttcttcagaaaaccaaacaaatacacaatctttatctgaagttctgaaacagaattatatacgagtagtttaccttggcatccgtcgaggaggtaagggtttccttcaaagccggcggagcagttgcagaggtagcccgggccgttcctcgaatcgacgcactcgctgtcgcggctgacgcacatgtagcccgtggcgttccgcctcgcctcccggcacgtcttcttgccgaccacccagtcgagcaccaggggcaccttgccgccggtggactccacgaagtcgccggtggtgacgtacgtcgtcctgaactcgaaggaggcggcctcgaccaccacggcgtagctgcaccggccgacggcgccggaggtggtgttgaacttctcctcgaaccccacgacgtaggagttgatccccctcgggatggccgcctcgcagcagcccatgccggagcacgacccgttctccagccgccccacgctggggcaggtggccatgcacccggtcatgtactccgtctcgttcaccgacgtcacgtacgcgagcgagttgcacccgacgacgacgaggcggttgccctcgtcggagacatggaaccacgagtcggagacgtcccaccaccacgtgctctccgcgtccatcgaccgggtcgtggcgttgtagcaccaccggttgatgtcgttgcggacgcgcgcctgcccgcggcggagggagacgtccaggacctcgtactcccagcagaaggggcggtagctgccgtcggcggtgcggttgcaggtgagcccgaaggtgacgtcgccctcgccggtgtagaggtagcagccgcggccgatgccgaacgggtaggggatgtccacgtcgccgcaccggcgctggcacgcggcggctggctgtgcagcagccgtcgtcgtcgatgctgccgccggccatgccgaggcgatcagcacggccatcaacggaagaagcatcgtccttactgtacgtgttctggtatggttgtaattctgcctgcttttgttgcgcttaatctgctatatcatggagacatggaaaggtttctgttcagattgagcactgtaaaatatctaaaacgaaccagcgattgtgaatggcgccaacagcaaccgcaatcgatcgcgtcattcatcattcaatacgaacgcgatcggttgactgcacatgtggacatatacaggccgaggaagaagtgcatcaagaaaaccaaggattgaaaatgattgattcagcgtttcagcgagcacaacgagtagacatcttctcagatatggtcagattcatgtgaaaaatgttgggttcccacaggccaaaggcatatttgacgagaattattcaaaactctggagagaacatcctctcgtatttgcatgtcacttaaatggttataaaaaaattagtaaaatataacaagatatattaatatatgatatatcactccacaaatatgtaatgtcaaatttaacctttacatgttgcaacgaaaaaaaaaagattgcggctatacgttaattagctgtaaaaaagacacgaatattagagaaggtcctaataagaagtggggcttcgaaccgaagtcatctgacccaccacattgtgaaactagccggaagatctctaattagatgtagtttaattcctcataagtttaaaatccacactcatcgtttgacagaatatattgtacaagaaagaagaaacgtagcagctttgacgttgaaattccacaatgggtatcaattttgttctgaagattgtacaagcaatatgtatcagtccacgagatacattttccgaaaggatgaaagctccgttcaggatgatgtctgaactggcaaagtaggtaggcagacgttgatcaaccagctgccaagagaagtcaagaacaaattaatcaaggaaacgggagataagcgcatcttaaaaacgacatttgccctttccggattcacatgggtaattactccctacgctaattacccattttaatttagggtaagccattttgatttttttactaatcaaacttatttagatttggtatagtttatagaaaaatttagcaatatttgtcacatataatgagttttattaaatataacaatgagtcgatagagtcaaattaaaccggttaggtacgaattatgacatatatttgaggaagcgatttttctatatctcactcgaaagattttttttcttatctctcactcgattttttcactcaaatttacagtgcattttcttgtaagttacagtgtaatttttgaatcttcgcatgcaaattttgaaatttatattggatttggtctttttcttgaagatatggtaattagtgtccattatgatgcttcttagatgctttttgccttttactgtgtctattgaattttaatccaaaaattaaaaatctgtgtaatataatcataaaaatctttcgaaaaatgcataggtacttccttgaggaagtataagttggacatatttcccttgaggtggttcacacatagtcggggcggcgggccaaagattttagttggactgggcttgcttgcagcagtggaagtgatggcggagatggtcactagtccgcttttgggcttggaacttggtgggctacgcctaccatatgccatcgaataagtctattttgcctcactcaactcatgctactggttgagtcgcatccctcaaccatgaaaccggatataacgtcaccccgtctatcaaaatcggtgcaaatcacctcctttagtgtaggaggtggtttcatccaacgtggcagattgattcgctgagtcatcaggtggaacccacttgccagcgccctccatctcatctcatcttctcccacacctcccccctctccctctttcatctcttgcttctctctcaccttccatcagcagcagatgccacacagcggcgacggtaccaagctttgtgacatgcggaggaggagcttgcaggtgaccacacatggaaggaggagctcgtcggtcggccacacacatggcccgcgacgcgtgtggggaggagattgccggcccaccgtgtgcggggagatgagtcgcccactggctacgcacgggggaatgagcttgctggccggccgcgcgcgaggaggggctcctggtgggccacgagcggggttaggagctcgcctgccagccacgtgcaggaaggagctcatggtaggctgcacagggagaaaggagtcattgaccggccacgcacggggggaggagctcaccgaccggcagcgcgcggggaggagctcccgtggaccgctcataggggagggggagctcccggctagctgcgcacgggaagatgagtcgtcggccggccactgtcatccctctcggttgtggcgtcggcaactccaccagcgggttcaaagcgagcttttatttttacctttgtcacttaaatgcgagactcatattttcaactcattccatgtcaaggttgccacgttagcacacttagatcaagtcaacctgccacttcaacaaaaaaaaaccgcttccaaagccaccgaagaagtcaatttgcaccagtttataaagttaggggaggtgttatatctggttttatagttaagggatatgatttaaccaaaagcaatagttgagagaggcaaaatagatgaattcctatgcgatctgacgatatgggccggagttctgaattagtcggccgtagtttcgcttttgggcttagattgtactataggatcttgcccacgtgtaagcccattaataggcctgtcagagatcgtttggcaaaactgcaatggcacaacgtcccactgacaattcacactggccaccgattcctccgatccgccgtgccgcaggctatcgtagacgtgcactctcgtgcgccatctcgtattttctgcctcgccctcgcgacggccctttgctcgtgtgccgcagagcgcgcgtacgcctgtgaaaaattctccgttctccccgcgggacgcagccgcaaacgctcgctcgtttctgccggtgttccgtttgcctctctgacgacagcgagtccatcatccataggaagggggtttccatttgagtcggcgaggcggggtggccgtcggtaacgattgctaccattggttacgtcaaaactaaactagggactagtttgcaaaatttacgatcgtactcgtaatcgacgactgtgacccaaaccactgaaccagggtctatcttgcaaaataccaccgctcgatcttcggcagccggccgttggatggggccgttcgctgtccagattgagacggaggtaccttttcacgaaaaccacccttatactacacattattacgccatgttctcctcgccttcgtttagccggatctttcctcacggcgggcgcagccgggggagtcgcttttgtcagttagcgccgagggtggaaaggctgcggctacgaaggaggccccgttcgcggcggcggcgcgcgtaccaagccgccatggtcgcgcctcggcagctctcgaccgcgaccctacacgatcgggcggcaaaccgaggacggccgggcagcgtgtgcgagcgcagtgggcggcggaccggcgctggcgcgcataccgtcatagtcgtcttgctgagttgctaaacgcctatctctggtatattgcaacttcaaaatatatgtgcacgctttcatatcttttattaattttattagataatggatagaaatccctaactctgaatactgtaaacatgtttctcgtaattaatttgcatcgacaaagctacctttccacttgaccatgatctaaacgctcgaatgcaaacttttaattagcccgaagaataatgaagtagtaccacttgaaactttattaatgtttagttgcatgtgtacatgttttattctacatttttttgtcaggaaatgctaaacactatgatctgataccatagaaaaatttagtaaatgcatatagaagacagatgcatgactatggcccatatacgacatggattgatgactagtactagttgtatttagtagttggagataaagccatgacttagctagctgtagatatattggtggtattttttgttcttggagttggatatatatagctgatatactggtgttgtttgagcaagccattttatttatatttagactaaagtgttatgactttaaaaccaccttattctaggttataacattaatatattcataaaaatctagtaggagttaggcctgtatcaaatagatccgaatatgttagatttttcaaactctagcgtatggtgcgtccaagtattgaaattttgctctttcgtaaagggatctcgtgaggcatctatctatttggaattttggatcatttcgcctttctctttcgacacaagaaatttgaggggtcaaaagttttgaccaaagtacgtatctgcgcctatcactactgcggcgcagacatcttactttcacctactcacgatcgacctcatttttttctccaatgaacaccgccatgaaagataatattgccttctttcgtttcccatcaatctctccgctttgtaaagatttacacagctccaaagattcaaagaatagtggtggtaagaaaaatgaacaagagatcgacccaagaggccaattctctgcctaaattaaatctggggcaaattctgcatgccaccggcctggatgaacagcttgagccagaagtcgtccatgtcgtcgtcgttgctcgacgacggcgaggcaccgcccgcgccgagaggatcgccgccgctcatctccatcccggagtcggtgctgtccaccgtcattgccagcgtctccgaccagaagctgtcgtcgatctggaactcctcctccgaggtgaaactgtccgtggtgttgtgatccgcggaggaggccatcgagtacgagtactcctcggtggtggcggccgacgtcgtcgtggtcgagagcgactgctccggcgacaccggcacggtggtcggaacgtcgatcgccaccgccaccgccgcagccttcttggtcgcctttcgcttgggcgcggcggcttcccggccggacgacggcttcggctccagccgcttcttgaggtgagtgtgccacacattcttgatctcgttgtccgtcctccccggcagcctcgctgcaatcgcggaccatctgaatcattcgccacaaatcgagttaattaaccaataaacaaatccgagacaaaatctttcgcgtatccaaggcaaaagattagtaaactagtattggacagtggcttgaaaagtaccggttgccgagaaggtcgtggaggtggatgatggcgtcctcctcctcgcgggtgaagttgccgcgcttgatgtcggggcggaggtagttgatccaccggaggcggcagctcttgccgcagcggagaaggccggcctgcctcggcagcgcgcgccagttgctgtgcccgtgccgctcgatgtgcgccaccaggatcctgtcctcctccgccgtccacggccccctcttcagccccatcttctcgcagcacggcgccctccccattgccgacctttcctcctctcgttcgagctctcgcgccctgtgcgtttgtttgtgtttgtgtgtgatggattgattgctcggtgtgtgtgtgtgttgctgatgctgcgtcgtctgtgtgatgctgcggaatgggaggggggaagcggcggggtatttatgcgcggggcgcggctacagcgaacgtggtcaattggggcagcttcgtcgcagcctcgcatagacgcatggggatttcttcattgtttttttattggctctgatcgagtccgtgttgctttgttcgtttttctttaatcaagggggatttttgtttgtgcgacttgtacgttgtagggtacaggcatgatgcatcggaggaatggaggatgcagtattgcagtgacgtaccccacgagtgtcggtttgtatagtggagtactagctgtgagattggagatcggatggtgtagattaatccaacactgtagctagaatgtcgtgtgctacgatataatttcaaatgactacataaatgctaaactgagcagagctcttatattctaaaagacgaaaacatttaaacatgtgtgctagagtacatatttataatcttattgtgaaccatatacaaatgatgtactagtggcttccttccttcttgcgcaccatactattatcatggtacgagggattcaataaatgattctagacttaacttgagtaatatcctaaacatagctcctaaataatttttgaagacaaggaaagaaatacaacactaaagccctaaaataagaagaccgcaactctcctcaacatccattgttcacaagtcgccaacctccttcataaggtttcacaccgatagcgagctcctctatccttgtgccaccaagcacactatctcccgtaccgtgtcatcgcccctcctccgtcccggcaccgcttgaagtaagcaaccctagcacaacactgctggaacatggcgttgatagtactataaactagatatgccatttccatgtccgaaaatatggccttaagtgttatatttatgtttgaattacgatggtgtgaaaaacaagaaataaacatgtggtgcatatggaaatagaagataaagaaaatatatatgtgctgacaatggggggctacaactgaatctggggtcataatttgaggactcgaaaaataagggtagccctcatttagtccttgggagcttcaaaataggaaaatacttttaggttctgttttttttttaaaaaaaaacaaaagttttaaatgtgtggcttttttatagttgttttcttagcattcatgaaaataaataagtgaaaaacctgactagaattaattttataattgaattctaaatttcaaaatgaattgcacttttgcatccttggcagctgcctagtacattgaagcaaattctgctggctcacgagtcattgctaaaagtagaataaactgacatcgatatgttagagcgtattacgtatgtatcttgactttccgatatttagtattctaattttcatgaagacatctcgtacagaaaattatcgtgttcaaaggtacacatcgcaaaacttcaacctagctatatatcggcccggcgcaaaacttcaacctatattaaaatgtcatatacgtaatgtccaagtagacctcatcagtgtttgcacgtgacaaacttctaaggaagaaaaggattaccagttctacactaggttttattagatttcttagcatatatattgcggtatacaaagataagcatgacgatcaaataactctcgataactagctaagcccacattggtaacaactttagaccatttctgcacgtttttgcctttttgggaagactaactaatgaataccaagttgaattattgacataatccaaccagttcagtggtgaatgcatgaagtttgaacgcgccgttacttctgtcttagccagagaagtgcttgtcgatcgaggattaggataaaaagctgcccgaaaaaggatgccagaaaaagtcgcattgagcatctttcttaatctctctttgattggaagatccatttacgattaattagacgatgatggtagaataatttaaccaagcggacgaatccagctagtgcactgtatcgcgttctactactaatctactacgaagggctcagtcatcaggcactgtggtttgaaatctaaacgacttttcggtttggagacctttgagtgatgatatgtgtggaaatttcagacgaggtcgtacgtctattcgggttgcagatcggttcaatcatatttttgcagaaaagacgagatcggttcaatcaagtgggtttttttttcttctggatttggtctaactaagtcgcctcagatcacctgctcgaatgtgagcacttcgctttactcactccatccctaaatataaatatttttagcacagtaacaagtcaaacatttttaactttaactatcaatataaaaaaaaatcaacaatataaaatgaatgttactagatttattattaaacaaacaatcataatatgcaactctttttatttaaaacatctcacttttataaaaaaatactgtcggtcaaagtaacgtgtcggagaatgtgccagagtaaaaaaaggcttatattttaggacgggggagtaatttgcttcgtggcgtgcatgtgatccttcggcgtcgtcgtcgaatcgtcgacgatggccgccgtcgagaggcgtcagcgaacgcttcagtttcaacccaggagagattgatgatgtatccaccagctcgatcgatcgctctagatccgtctgatttgattagtaaaaggatcgaataaactgcgctggtgaattaatggtgacaagcacaatataaaaggatgataagacgtgatcaagcagtgtattgtgcaagcttcttttttagccgagacgctttcaacaacactgttattttactggtgtcatcatgcaagtaaactagttcttgatcatctccaataattaatgcaagcaagtatatggacgaccaagcaagttctggaacgtgtggatgaattctacacggaggatcgatgattgcatagtaaatatcttgtgctctgtgttttataactaacggggcctataattaacactcgctgttgatagcgtgacactgacactgacacccccgggcccgtacagtacgtgctggcagagagaagagaagggaaagggagaaagcgagacgcctctctgttctctgccattgttggggctttgtcgacggtgactatctacgcggcgcgcccgtttgcaagctaccgtgactcccggtcgacatgctcatcttggctcatgcacgcacgcgcacgggacgacgcatgcaaatttatggcgaaaacgatcgaccgaccggaggacgcgcgattgatcgagagagagcaagcccaactgcgagttggctggcgtcggtcgatacatatagccatgaccccatgagtacgacctcacctgagcctagttttggccgacgcgtgacaaggtgctacatcgtactagtactagtagtacgtgtttgctagatttccgttggtcgtcgttccagtgtgcttggtcccagcggtgccacgcatatgacgagattgtgtaggcttgtagccccgaatggattctggaggtatgtgctgtcattgcggttggttaattggctgtagtcataattatactaccaaaattaacttgtggtccccaagtgcactaatacatcctacacttatttgatcacatgaacatgataaggggataaatagttccattttttcacacctaactaacacacaagatttacttaatccccttctccttataatactaggtcaaatacgtcctagagatggttgcgcagcaaacggcactactacataaaagaatttttctgtgcgagcaccccaataaattgcaggtgaatcataagtatttgagtctacaaaaattgacctaatttttacatatggatccttaagagacccgcatgcaaaaaaaaatatttttataggcgaacctcttaatagtccccgcatgcaaaatccctccacggctccaccccactcttccaaccttttttttcatcctcccctcccccctctctctctcccacccactcctctcccccactcctctcctctctcgcggcccactcctcctcttccctctccttcctccctcacggaaaaatgacgattttcagatcttttggtgcagacgtgtctctgatctgcacgtgaaaatctagttttgtttgtctggaaaaattgtttctgtgctagcacggatggttccatcgtatcagtggctcgacaatgatcaataatattacaactaagataggcaatatatagtactaccgacgtgaagaaccctatttataccaaatatgattgtgtataactaatcactcgaggtagtagaactcgtcttatagataagtcttatgccaacattaggagctcgtctctatactaaattaattaagtcttgtcgacgtttgagagttatgactagggtatttggatagtatggggatcgttgtactaggatatatgcgagattgaggtaaaatagatcgagagatggatttttatacaggttcggaccctttatcttacaggtaatagccctacatcctgttggacgaagccggtgttgctctttattcatctggatcacacaaatacaatatctgggctaacctatctaactgtcgtcgacttaacggctagataaacaacctgtagtcgacggcagggtagtcttcctcctcgaatgcaaactcttcgagatcagagatagcgctagatccctcttgcttgcttccgtagacaccagatggggtatggctaggctaatttcttatgtcgagatccggtgacgtgtgttggcttatggttttgtggcctatggtgggtgtgtcccctctcctcctagggggcttgtatttatacccatagttgtccccttgtccaagtagaactagggagataaatatgatacgatccaagtagtccttgtcgtttccatgcagaactttatttgtcctgtcttatccggaactccttctatatacgaggtttgtttccatataagacatggtatgtggtgggttctgccgagtttagtcgattactattaggtatgtggtatccataaccttgacaattcttgtgagttttagatgagaacttctatggcttgaaaaaataaggtggatttaaatttgtaaggatgtactcactccgtccaacataaatacacctaggattggatgttacctgtctagattcgttgtagtatgaaatatcacatccaatactgggtgcgcttatatgggcttcaaaactttgtaaatatcacattcgttgtactatgagtagtcataatatagagatcactactacctctagttctttttgtcatgtttaccgtaaaatctctccaattaaaaggtactagcatgtatatcatattaccttcaacacacaaatcttaataaccctttttgctggttcacttttacactatatcactttttttactctttttttaaatattatgtaaatgttatttcttacctcatcttttctcttcttacttctctcatttatctcatcacctaatcctacgtgatgtttttaggggcagcagacaaacactcatgatacttgcactgatagtccaattactacagaaaactaagcaacgttttggacggatgccgaagatttcgagttatttttaagattgacccgaggacaccgcagaagtttctttgcacggcagcacgtgcgcgggtgcgtccctaggttgaccaatctaaggaggacgcaagccagtactacggaagtacgcaactgtgcatgcattgccactgccgctgcaggctgccccaagaccaaaagtgaccaaagagagcagagcagaagaacggtcaaaccgttcaacggcccttcgcgtacatgcatgtgggtgtggctccgtcgagtcaaactggctgcgaacgacgattggccgttggcggacgcatatgcattcgctataattctttagataaggttattgatattttagataagattaaaattaatttttataactttaactatcaataactttcatatcaaaatattaagtttaaaacactacaacaatatatatatatatatatatatatatatatatatatatatatatatatttatatatttgtcttacaaggtacagtaacaaaaataaaaaatatttatttattatatattaaaaatcagtaaaatatatatgttgtagaccgtgccattatctaaaatataaaaattaaaattatgaaaacaggagaatggctacttgaaggccaaagcatcaattagaaatttcttttttataatatttagggtgtaatatttgtccaattagacgatatgctagattatcaaacttagtgataatatcttgacagtagaaatgaataagttaattaactattactaacttcagttcgaagataaggtttttgttccactaaaaaaactatcgcaaaatttaaaggttgttttaaaatacgactctaacaaaattatattcaaaaatcttttgtaaaaaccgcatgagcttaaaaggcgaacccataaccatctgtaatccatacataacaaaaaaaaaacagggctttcgcgtacactttttcccacttcgccatcgagtgtttgatgaaattaacctccctaaacaaaatatagactttgatcgacgaacttgcatgcttcaaagatgagggacggttgaccactgtcacgttacgttcatacacttgatgtgtgtactcgtccatcactccatcgaccgtcgtactatgctgaagtgttgacactgtcctgccggctatgtcgttgtcttccccgacgttttaccggccgcaacttgctcgatcgatctccgttggaaaggtctaatgcgagagacaagtcacgcagagctagctgcatattactcccttcctttctctagtattgatacatatagatattaataaatacacacacacaaacatatatatatatatatatatatatatattcattaccatctaaatgaatgtgggcaatgctagaaagtcttacattgtgaaacggaggaagtacgtgccaatgtgctgtatttagaatggctagtgaagtgtgcatatatgctttctgtgatccctagatactctaactgtcttataatataaggtattttgaagagatatggcattctaatatataaatctggatagagagtgccttcaaaattcttatattacattttaggatggattagttatctatcttcttctctccttgcaaaatcccagtaaccaatgtggcgtgtcactgcttgtattatatgcttcttctaatatattaatgtgtgtaaagcttttaggtgtttgtaaaaagaaaatttgctacaataaacttaagaaatggtttctgtacgacctctgcagaaaatgtgtatacgcaaggcaatataacatgttaatcagttggagtagttagcagtgctagttttcttttatggtagtgccttttggataaacagaaaacgcggcgtacgtacgtaaggtttaattaaacagaaaacgtatcgtacagttcaggcgaaaaaaggaaaaaaaacaaaaagaagaacgacaacaaacgtgaccagtttaaagtaagacgcttgtgccctcgtttttctcctgtgggcttgacagttaaattaatcgcaaaaggcaagatacatgcagctaatatactgacaatagatcatttaactaatactaatgtcctgcgagtatttctttttttttttcatgaatgaatgtcccgtgaggatattattaatacaatactatactacgactttgtttggatttttcgggctattaaatagctctccggaatattactatttagaagtattaaacgtatattactgacaaaatcaattccataatccctaagctattttacgagatgaatctaacgaagtatattaatatatgtttagtagatggttactgtagtatcactgtagcaaatcatagattaatatacctcgttagattcgcctcaaaaaaaagcccagagattatggaatgagttttattagtaatatatatatatataatacttctaaatagcaagattttagagtgccattatagcccgaagtatcaaacatggcctacatgcacctttgatcgatacgcataggacaagacacaggtcgttgcaaattacaaaagcctacgactatagtagagaaactgccgctttggcggtcatcatcaccatatggatacatttcgtcgccttcttcgatatatccatctcctgctgccttgtccatttgtcaatttgtcatacatcaaagcccatcgctcgcaggtagcagctgccaggatcgttcctagctgatcgagctgacaaagtcatgtacagtaatctcaagagtggatctgcagttgtcgccaatcatgcctgaattaagctgcgggatctctgtcgttgtacaaagtttctttatccgatccgtagtagtagtactactagtactagcatagtgtgacgatgatagttttccaagacactccctccgtactttaaaaaaaagcaaactctgggcttccatgtctaattttggctatccatcttatatgaaatttttttataatttatattttcattgttgttagatgataaaacatgaataatatttatcggtgatatgggcccgggggtagcttggggtcgggccgcccccaaacccacgtggctccccgcgaggggggatcaagcccgaggtggagcggtggctacccccactcagctagagggaggaggctaccccctcccagcttggggtcgggccacccccaaacccacgtggctcccagcgaggggggatcaagcccggggtggagaggtggctaccccctcccagctagagggaggaggccaccctcaaacccatgtggctctccccgaggggggtcgagcacgggggttgcggcggctgccccttcccagcttggggtcgggccgcccccaaacccacgtggctccccccgaggggggtcgagcccggggtggcgcggcggctaccctctcccagctatagggaggaggccgccctcaaactcacgtggctctccccgaggggggtcgagcccggggtgttgcggcggctgccccctcccaggttggggttgggccgcccccaaacccacgtggctccccccgagggggggtcgagcccggggtggcgcggtggctgcccctccaagctagagggaggaggccgccctagcttggggtcgagctgccccgaccccctccacgtatcagcccacgtgtatagggttaggtgggcgcgcctaacgggcgcacctaacgcccacctaactgcatttaaagcggtctatgcaaccgcgccatgccgcatttaatgcggcgtgctgcgcatctgaccggtctgtgaccggttgaatgaccgatgggacgacgactgtgtacccccgtcctgtcagtgtgtcaggcggtgagcggcgtgctccgtcccgtcccatcataatgatgaggggcttcacagcctcttaccccggtcagagctggtccaaccaatctgaactgacccgggttcccgttttctagtgtgaacgagaaaccggaagtcctcatccattaaatagcgaatgacaagggcgccctgcatgatttgatgggccccgcgcagcaaccgacgttcagatagcttctgggttaagacacaagacatgtaattaatatagagaatattttcccttctccctaggtagcactcgcagtacatgtggtatccccttagagtataaaaggaggaccatgcctagcgaggaggggggatcggactgaggatccctgagccaaagcttgtctaaccctagctttcataccagggattcagggactttctaagcacagaagaatcatacacacaggagtagggtattacgcttcatagcagcccgaacctgtataagcctcttttgtctcatcgtcttggaggagcctccgagatcaagatcacacacagtttcgcctcaccaaatcctcgaatctcacccactgcccccggccgaactctcaaaggggggtctcacagcctcccgctagagagggtcacccctcgacagctagcgcgccaggtagggggcgcgttcgtgatttttgaggttctgttgagcaccggcgtggtgagtgtcgcgccgccgcaacgggggaaggcgcagcattctcaggggtgtcgcgccaccccaggcagggggcaaggccccccacatccccaccaggtaatcttggctaccaggtctttgtggcgagtcttcggaatgtctgagggcccccaaagctccaggcctacctcaccaagaagtacgacgatggcactgacccctccgagtccctctagatttgcacagcgatcatagaggcggtggggggtggcgaccgggtcatggcgaacgtcttccccatggccctcaggggccaagcgcggggttggcccatgaacctgctgccgcctcagttcactcctgggaggactcttgcagttttgagctccgggtgccatcgaagcccgggaccccttgtgctggctcttctgtagcggctggctttggtcccgccggctggctacggtgctcgactcggcttaactgatcgtcctttcaagctttaagtattttcaatttttcaattcattagcttaaaatcttatatttaatttccccccattctattctcatggccctgcgacgctcgcgtgttgggcatttgtttggcccctcggtggtaagagcccaacctctctcccatctacatgaacgattattcgctaagtgtgggggctaagtcttctagccttgtcctagccttaagttgagctccgggtgccatcgaagcccaggaccccctgtgctggctcttccgtagcggctggctttggacccgtcggctggctatggtgcccggctcggctcaactgtggacggggattgctggctctagaatttttcggctttcacactcgtgcgaaagtaatcgtccatgaagaaggaagagagattggaaggaggccaccgaaaggaaagagcgaacaaaatgtgtagcgttggggcgtaggctcatgggagcttgacctcgtttgctaagtggtcgcaggcttccctaaagagttcggagcctagggtggggagccctcttcgagccaggtttgaaaggtcgcgacgtgtaaacaaggataaacaaaggtaacaaaggaggtgttacaatacccggaccaaagcagatctctctgggaaagctcagcgttggccggggactctttttgagcatagcatttgtaatacttcctttaagtatatatcttctttattcatgcttatcaacaaaattatcatggcttatatttatctctcaccatctcttcctcgcggtcccacgattcccacgtgtcgcacgctcgtttgcctcccttggtaacaaaaagtttgtattcacttcacccattcaaatgattctttgctaaaagtgtggaggctacgattcctagctctatcctagccctgcatcgagctctggacgccgtcgacgcccggggccccttgtgctggctctcccgtagcagctggctttggccccgtcggctggctatggcacccagcttggcttaatcgcgggtgaggattgctggctatggaaagttcagtcctcacactcacgcgaaaataatcgtttgaatagatgaagtagaacatgaacaaaggttaacaaaaggcaggggcaagcgaggtgcgcagcatgaagtcgcggcccgagagaatctaacaatgtttgctgaatatataaagaaaataagttcacaacctaaggtacgggactgcgagtcgccctcaagttggagcgaaaaaggcgcatgggccctagtgccagcaaagaatggagaagagaccgggcccacatcgttagactaggagagtggcgtcaactctggccaacaggggaaggttttggtcagggctaacgccgggggctactgtcggtgatatgagcccggggtaggttggggtcgggccgcccccaaacccacgtggctccccgccaggggggatcaagcccggggtggagcggaggctacccccacccagctagagggaggaggccaccctcaaacccacgtggctctccccgaggggggtcgagcccggggtgttgtggcggctgccccctcccagcttggggtcgggccgcccccaaacccatgtggctccccgcgaggggggatcaagcccggggtggagcgatggctactccctcctagctagagggaggaggccgccctcaaacccacgtggctcttcccgaggggggtcgagcccgggggttgcggcggctgccccttcccagcttggggtcaggccgcccccaaacccacgtggctccccccgaggggggtcgagcccggggtggcgcgacggctaccccctcccagctagagggaggaggccgccctcaaactcacgtggctctccccgagaggggtcgagcccagagtgttgcggcggctgccccctcccagcttggggttgggccgcccccaaacccacgtggctccccccgaggggggtcgagcccggggtggcgcggcggctgccccctccaagctacagggaggaggccgcccttgcttggggtcgagctgccccgaccccctccacgtatcagcccaagtgtatatggttaggtgggcacgcctaacgcccacctaactatatttaaagcggtctatgcaaccgcgccatgcataaatgcggcgtgctgcgcatctgaccggtctgtgaccggttgaatgaccgatgggacgacgactatgtacccccgccctgtcagtgtgtcaggcggcgagcggcgtgctccgtcccgtcccatcataatgatgaggggcttcacagcctcttaccccggtcagagctagtccaaccactctgaactgacccgggttcccgttttctggtatgaatgagaacccggaagtcctcatccattaaatggcgaatgacaagggcaccttgcatgatttgatgggccccgcgtagcaaccgacgtgcagatagcttctgggctaaggcacaagacatgtaattaatatagagaatattttcccttcttcctaggtagcactcgcagcacatgtggtatcccccctattaaatactaaaggagcgagctctagttagatacttctttctttttttctcgagctgattgcagcggtgtaggcgctttccagaggtggaagatttacgttcttcctatttgacctgaagaagagagacgaaagaaagtagtgaaagaagaaataaagtacgcggataaaagtgaaaaatcacatagctaataatgctccacctggaatctggagaagcttaccagattcagaagccatgtcaaggaacgcttgaagcttcaaagctctcctatagtacatcatgcctttaactattcacagaaagtcctattgacacctcgatctttaaagaaaactgactccttctcttttaggatttgattgtcattggtccttttttcactaatgatctcaccatagtagttcgcgcgagggactatgtcgcttcgccgcgcccaataattcttattcacgggaaccgaaagattcgattcggacttcgtagagccggtgctgctgctgtctgcatagggccgtcccccactcccgcctgaccttcagctgagaaattccataccttccaccgacttcttttgtgtgtgttctcgagctagtccatctttctatacgaatttcttgaaagaatacttctcttatgatctactacgagagtgtcaagcggaggtggagagcacaagaagtgctagcacatgtggtatccccttagagtataaaaggaggaccatgcctagcgaggaggggggattggactgaggatccctgagctaaagcttgtctaaccctagcttgcatattagggattcaggggctttctaagcatagaagaatcatacacacaggagtagggtattacgcttcatagcggctcgaacctgtataaacctctttttgtctcatcgtcttggaggagcctccgagatcaagatcacacacagtttcgctcaccaaatcctcgaatctcacccgctgcccccggccgaactctcaaaggggggcctcacagcctcccgctagagagggtcacccctcgacaatattttatgcgtgacttgttttttaaatttttttcataattttttcaaataagacggacggtcaaacgttggacacggaaaccagggtttgtcttttttttgggacggagggagtactccagtaaactcttctactggtatggttatatatagcgttgacgactggattgttgtagcttgttttcaaaagaaaaataaaataaaaagagactggattgtagctacgttgaacctttatttcttaccaacagatttgtgcaaacttagatgaatgcatgataatattaccatatattgatgtacgtggaacaacaaatctaaccatatgacgtttcagtgtatttctaacatgcttgtttcgaagtctagaaattactactagtaccttaagtcacaaataaatatattttgaacatatatcgatacagtcacctagacattaattgatggtcaattactagtatagaccctatgaaacacatatcaaggttatactctttccgtatcaaaaacaagtgcaattttacactgttcatatataacgtttgaccattcgtcttatttgaattttttatgattattattattattattattattaggtgacaaaacataaatagtactttatgtgtgactattttttttatttttttcataaatttttcaaataagacaaacggtcaaatattggacacggataaccacgactgcactaattttgagtcggaggtagtactatttttgtaacttctttgaaaacaaatatagtcacatcactctcaaaagttgaactaaataaagggattttgattgtaaaaatttaaacgtattgattgcgcacattacagaacataagtgttacgaggaagtaacatattacttcctcattctaaaagtctaatacctactatttcattctttggtttttctaaaagcctaagttctatttgtagtcattatgtgctaaattaaattgttgatagaatccaagaagccattttaatacttattggttgcatatttattggttttgtcatatggtgaatgaattaattgcttcttggtcttggtgaaaaaagaaataggaatcagatttttgggaaggaaaaaaatcatcgtgtgataatggtgggtctagattacaatgttttagattactgatatatcaccatgtgtaaagtacaaatgtatttatgaaaaccaaaacatgagctgtaaaccaaatcccattaaattttcttttggaggaaatccaattataagtctagctccgtaaagttgtgaaaaatccaagctaaaagtcaagggaaattgtgttattgctcttattactttgaattataatcatgattttacccttgtttttaggatctgtgatgttgcttcaatttttagctgaaattccagcttgcccctgtctattaaatcgtattgatagtgttttttttaaaaccgaagccgacaaagctggtgttatactaagtaggggaggaaaaagtatttacaagatcaccaaaatggtgaaagagagagaggggggagagaagaagctactaaaacaatgaaaaaaaacatcctaggtggataatcttgcgatatttgttgctccacatatctttcatagcttgatttcgttatgtatcttgtctagtagctgcggcaggtatttttcctgatttcgaaatacttgtctgttcctattaaccatattttccatatttcccatgctaccagcatgtgaactgttttttttttgatttggctgtcttttccacattttatatctatacttttgtgatgaaaagacatgtatacgcttgtatattgttacaaatttgcccatattatctttatacaatagttgtggttttaaccataattttatataacggttgtgtttctacccatacttttgtatccaaagcttaaataagtgcttatgctaaaaataggagcaaaataaaaaaacactaaaaaaaggagtaaaatcagaatcgcacttgacaataaggacaagaacacagttatcctttgaagttaccgacttaagatttgaatggtaaagctgtgacatcaaagtgttaattaggaacaaatggaacagagaaaagaaaatagatgcgccgttacatatgactatatcagcaaccatattatcgtcattacgcggaccaagtactgttgaatccaaagaccaaatttagcaagattgataatctgctactacgcttataatacgcgtaaggtaaagagtcccagtcgaggatcctacaatagaactaaactacacagagtgaacaaaaattcgtcaaacggcaggcgatcgagcacgtgtattcacactggacctttgtgttggcctcacttcaagtcatctagctatctaggcacataagcaactacgcaagttggtacgcctcactaacattttgttactaattcttaacgatgcgaaatctatgcgttttgacattttgactacacgtcgacacgagaagaagaattcgtctttaacaaaataaaaaaaattaaagcgttggaacatatatttatatacacatgtaggaaccgcacatatgcatagatgttcacatgtgtccgatgtgttaacgtcagttcgatcgtcatctgatcgtcatttgtcaccatgtagtttaggtccatccgtgacgacagttacaacgacgctgttcctggttttctctgctaccaaaagtgagcaaaaaagctagtagaaaaactttgttttagtctattaactccaacactaatcaagccaacgccgaatctacttaactttccggcattttggatcttggagcgagtattgtgacccttgacttgagaaaaaaaacagaggcttgaggcgacgaaatgggagtcgcttttacctcccggccgttccatttccaaaagtttctctggactcagcaagtgaagaaatttggcttcatgattttagtctgcatggctttatcgcagagttgatttttctgtgacctttaggctgttaatccacagtactcgcactgcaagttgcaagtgttaaaagtgaagatgagacggtaaaaaaagttgcaaagctatatacggcgtggctcgaaaggaattaacagtttaacaccgagccattaatcaatctagcaagcatccattgacgaaggctaccaagtgagtggtcatgtggaaagtgggcagaaatttgggactttattgaattagaaactttaccacgatttaataagagtaaaataaaaaaaagagattaaaaaaagaattacattaaatatagaatatagataaataaacatacacatctagatatattctagatcttctttcttgactatatattttagtattttaataaattcaatattaaaaaccctaacctttcctatcaatgtgtatctatccgtaatattttagaatattttcgaattagagaaatttgcacactttctcatttgattcgtgaggagctggatgagaagaaactctcatgtccagttttgcagtagagatggaactaagagagaatcatcgactataaccctaaaaggaccagatttcgtaaataacatagaggaataatgaagggaaaatcctaccgaggcaattgtatttgttttgatagatatgctcttcaagcacttaacccacttggattacggcgaggcagatagaagcaggacgaagagcaatgacacgatatgcacgtcatggtggaaaaatctgggctcgtatatttcccgacaaaccggttacaataagaccgacggaaacacgtatgggttcgggaaagggatccaccgaatattgggtagccgttgttaaaccaggtcgaatactttatgaaatgggcggagtatccgaaactgtagctagagcagctatttccatagctgccagcaaaatgcccatacgaagtcaatttcttcggttagaaatataaccccccaaaaaagtagtattgaaaataaaaaaccaggttcttctttctggaaagacaatatttctttcatctttttgcattgaaatagcaaattgaaatcaaaataatataatttaacctcagacccttttaaatgtagcagataatagtggagctcgaaaattaatgtgtattcaagtcataggagctgctagtaatcagcgatatgctcgtattggtgatgtaattgggctcttcgatcgtgtagtactgtagtcctattccgggtcaccagcagtctaccgagggcaagaacaactttacattttgtggagctcaccaaggtagaaaagctatcgatatcaaacgcttcgattaactatggggcgttcacttgatgggtgaaaccgtttcggccaaatacatccttgactcagaagcgggattgatttcattatcaaaaaaataagtcaaaccgtcatttggactgaaaaaaagggggagattttcgtgaagagttgaaacaagatgctcatttttggcccggagaggagagggccgaatggccttgagctggttgctcgccaagggagcattccagctcaggccggcccatccaaatattgcaaatctcctcaagtcataatgggcttattacttgtcttggtgactttctagttgtactactagtaatacgtctattttacgcccctaaactcttgctcttgattgaatcgcccccctcgtctacaaaaccgagtgtaacactgtgccaccgctggtgaggcatgtaacatcgattacttgtgctctcctcagtggaatttgtgctaccggtcttgggagagagatgaaaaaaagaggagagagaagagaggagtcgctgacatgtaggtcctgccctgttgacttagtaggtcaactgtggtcaatctaccacgtcagtgaaatccgctttccaaaatactaaacgagacgatttttaccggcttttaaaaatagggatacgttatacccggttttatacggttaaggaagacgcttcactcataagagaaagataaaatagacttatgccgtactattgtgtctacggcccaggagactactccgtcgaagtcgtaatgggccaatacttggtggccttctaatcttctctctctctcttgggcctgatctacgggccagcgtccacgtacgcgtcggcctgtgagcatccttctagaagtgggcagcaacatgcgacgattccctttccagctcgccgtgtccaactcagatccacctgtccgtccgtcgctcgccgtcgattttgaacgtcaacggcccacgaaaattccaattcttctccgacgccgccgcagcatctctgacccctcccccccccccccccccccgaaacggcgagattaaacggcaaaaaagctgcacacgacacgaacgcgacgagcaaagagcaactcctccggcgaaccgaaccctcctcggcttcttcgccgaatcgcccgcccgcgcttctcttctctctcctctcctctcctctcctctcctcgcggcggcggcgggatcagatcgggcggcccgcgatgtggcggcggcggggggcgccgtctgggatagggctctgggccgcgctcctcgtcgcggcggccgtgctggcggccggtggcggggcggcggcggcggcggccaaggacgaggcgtacgtgacgctgctgtacggggacgagttcgtcctcggcgtgcgggtcctcggcaagtccatccgcgacacggacaccagccgcgacctcgtggtgctcgtctccgacggggtgtccgagtactcgcggaagctgctcgaggtacgtccgctcccgcgatgaggattccccagtccacgaattcggtcgatttgttatgggcgtgcatggatcggcggttgtgtgtaaggttggtgtaggattggggaattcagcaggggaaaattaacttgatccatttgccccgagcttatgtggtgtaatcaagtttagtgggacgcgtatctcttatatctagttcagttctgatttaatattatgcagaattggctaactggagaatgctcatgaatggaaataaagttgagaacaagttggagagtttgttaggaggtgttgtatattggagtagtattgttggttagtgtatatttagctaagttgctttaaatctgaaaggagatctttcgattttttttttaaaaaaaaggttgaaatgagagctatttaatgcttttagatgcaacgattcttatttgcatttgccaatctctgaacacagcaaacttaaggagcacctttgctgtccaatctctgaacacagtaagcttaaggagcacctttgctatcttaaacacttaatttagcactctcctcaaatacttttcaaaacaccgttttcatcgcactgtccaaacttgatgaagatgatctggtttattcagatctatgaagtcccttttcagtttaatatcgataaatttatcatgttagtgattagtggttcctgaaaaatctgtacagatattatcttagataatgcattattaatttaatagttcactttgccactttggaaattgcatggttttttttaggtcacattaatttctcaatggacactaagtatgcatgatcattaatttatgtctcacacatgccatttcaattagggtaaaataatctcaccattccctatatattattatgatattagaaattctgttgtggtcttatctgcactgtaatctttgatggcaggctgacgggtttatagtgaagcatataacattgctggctaatcctaatcaggtaaggccaacaaggttttggggagtttacacgaagttaaaaatattcaacatgacaagctacaaaaaaggtatagttggatgatgtgttctgctttctatacatcatgggcattttgtttgttttggtttcatttgaattgcctaattgatctaactattctggtatgttttacccccacttttttttccgaggtcagtattgttctcatattcattttcttttgttttccagttgcttacctcgatgcagacaccattgttgtgaaaagtattgaggatattttcaactgtgggaagttctgtgcaaacctgaaacattctgaaaggatgaattctggagtaatggttgtagagccatctgaaactcttttcaatgacatgatggacaaagtaaacagtttaccttcttacacaggaggttagtacaattcgttacttagcatgcttgttctttctggggctatatacttatatgtttttcttaactgggttgaactatttgacagcaaaatttcattattaaatggtcactttcttagaggctttaccatacaataagaaacactttttcctattgccttcagttagtatgaactgttgattctgcatatgcacggtttgagttgtctttgtttattgtcctatttgttctatacctgtaatctattgtttatattttacatcttatggttttggatattttctttcttgcaggagatcaaggttttctcaattcatactatgctgatttcgctaattctcgtgtttatgaacccaataaacctacaacgcctgaacctgagactcagcgcctttccaccttgtataatgctgatgttggtctttacatgctggccaataaggttatactcaatgcattcacacatcggtcatgtcatcctgctctttaaattttggtggttttgttgctttatatggttaatttattataagaaatatcaccatataacaaggatcactgtatactcaaattaattactttgattgttatcttatcatggtaataaggagagtattctgaaggaccaataaaactttattcaaatgttttaatgcattataaagttttcattcattgaagcataattttttaaaaatcctttaaccattcttgacaagcgggatttttttcctccattacacagtgttttgtcccttcttgcaaggaatgctggaccaacttgctgctcaaatctgacttcttttcttgtctaaaacaactgttcctctcttcacataggatagatggcgctggtgttatctgttcaactcagctgaacttaaaactagttcaccctaacacaacccctcccccaacccccggcacgcacacaaaaaagcagaagaatcctgtttttgtcttttgcaaaattaaaatagtatacaagtccatatagaactggcttgctgttttttcccccatttttgcaaataatatcaaacagtggtttttcatgaagaacaagatgaggaacgatcacaaactttttgactcatgacacaatgtagctcagtataattggcagcatctcatttatgattttcctaatcctggtccttttctcgatatttgtatacttgtggaaaccaaccagctgatgtttttttttctttgtaatgtaagttttagatagccttgtcttatttagttattttcgtaggagagctttgattatattgcacaaatgttgcattagaggtttcaaactgtgttaagcacagacatttgattctcagaaaagattcaataccatcagctaacacactatcacaacatttcagatttagaacgttttaacaccttatgatatctcatcatatataatccacagcctgctgattatttgtaaacgtcgccttcctaactttgctgcagtggatggttgatgagaaagaacttagggtcattcactacacacttgggcctcttaagccctgggactggtggactgcttggcttgttaaacctgtggcagtatggcaggtaattaggtatttcttgtgtgattttagtgggatgtgaagtagcagaatggctcaatgaacttgtgttatccattgttgcaggatatcaggaaaaatcttgaggaatctctccctggaactggtggagggagaaatcctcatgatcaatcagtggtcaaaattcttttctctctccctttattcatgctgatctgtggttattatggttcatgctttcaggttaaattctcctcttgctggaaatatttttctttaatttcatggacatgtggcctaaatggtctgtctatcttatgtactatacagactaataaggagctgctgtgtataagatctctgtgtgcttttgctcgacgtgctcgctacaaatacaaatcagaggaagcgcttccttcttattcaacaattggagctgcttcatcgtcctttggtatatcacatcaaaaggttgattacacttaaaagtttaaactatgaattgtgaatctttattatatgtatgtaagatccactgtgtacatcattgccttcagaaaattttcagtaatttcctgccaatttgaagtagatctttgttacactctctgtccaattcataggcgtattttaatttggcatagtggtcaaacttagactttgacaattaattttctcttacaatatattgcagtggttacaaaagccagtatcatatgatagcacattgaatcatttgtatacattaagcatgcatataatttgactaattattagttaaaacttacaaagtctgggccttccaaatagatggacccatggacaccttataaaattaaacggagggaatagtatctaagttgcatattaagcacatttgtgacatcaataagccggtagagtttttcctgttggataatgttttctattcaaaaccaggatcgttttaggttctaaaaacttgcataactttgacgaatgttggtaaaggaccaggctttgttttcttcgaaagaactatcatgcaaaaccacatctagaggggaaatatttatactattttcacttatctaattaatttcctgaccctgattccacatatcatatatcatgtacctttttcagaaattgagtttgctttcatgataataacttgatgtttgctaactcccttgcagtcacataatggagcacatctgaagctgccttcttattttggtgccatcaccgtactagtctgcttcatttctgctttaatatctcttgcctttgcctttattattattccacggcaagtgatgccatggacgggtttgctgctgatgtatgagtggacctctgtgacgttcttcttgttgttcgggagctacctccgtgttgtatacaattggggaagttctagtgcaaatcatgtcgggcataacaatttagattcatcagaaaatcatgctggtgcaggtttgtaaacttacacaacttcctgcaaatttgtatttcttgcttaggctaatgtgtagtccatttccaggacttcagcggaatacgtcggactgtgacacagatgcagctttctattggtcagggatggctatactatctagtatagcattattatcaccaacagtcctgggaataactgctctttttgcaaagtaagatagggggtggttcattgtctacttttcttcattttgaaggaaactggcaaaataatctgtagctactgttcagctggctccatttttaacttctcaaaacagtgtgaacctaacaaattctgttgtgttctttcctttggcaggcttgggttgatggtagcaggtggcgtggtgttggcatcgtttatgacatacgcttcggagcatctagctatctcggcctttgtcaaaggccaaagagataggaacgcctcgagaggtagcatttgttttatgtgctagtcattctttgaccgcggcaatttctttcaccttgtgtccgaaatgtgcctgttgtaatttgtatcataatgttgtaaaggaaaattttgatgatttatttagtagaaaaggttgtcagagaaaagaactgtgatatgtttaatactagaacacattgccacctctggctgcagttttggtgattcttgatttgaaagcttgagtactatcgcttaaccctaaccataataatgtaccactagtatgactgtttcatttgcttccatttgcaaacaggtcactaaactacgagggcgtataattttgccccaattcattttatcaagtcacctaaaaatgacgaaagcaattgaagaatagccagtttggttgctcactttgatctttaacatcttgctctcccttcacgagattccgtaaagccattcttggttcatccaaagagccatcagtaccctagcaattggttttagcttgattagcactacaaccgttcttaaacagatgacatcataaagtaactttgaaatcttgaattcattaatctttacctattattaaaattgaagatttcgtactcaccttattttttgtccgtcatccgagttaaaacacgtataatcctggatcggaccaaaaaaaccatcactgatgatacattatgcaaaaattaggatacatgcatgtgtgtgggggattcgaactctagtctcctagggtacatgctacatgttgcgctcatctagtcaccagagcaatatagttgttttgttaggaaactttttctctatttggctggcttgtaactcatcaatctctctatccccaatctcgttcataggtccacattccatcgctcttgtgttgtctgagcttctcatgtgtcattgcgaattctcgcatgctcatgaagagtctaattggggaaaatttatgtcttttggaaacgtagtggattccataccctatcaaggtagaatatggctcaagcagagggggctgtagcaagcgctttactagcatatgaaggcaaaacgtcgttcgagtccgacacgataaagcaatgtgtcatgcatgcatgataacgcgatcctccaagtcggactcgataaagcgtcatgcatgtacgagaacacagatgggtgtgcttgggacacgttttttttctcatccacatcgcttccccacacagaaccaccatattcagtcaatctatactattataatttgagcctgctatgatctaataatctaatagtaaaagtcactataattggaataggtaaattatttttacccgttgcaacgcacatgcatttttgctagtatataaaattattagaatctaatataatgtgtgataatgatattaacatatttttatagaaacacttaataatttttaacaattattataaatattatttgaagataatagtagtaataacgttaaagtaaaaaaaaaacaatgatgtagcaatgtagcagccagctccttaatttgttctaacaagcacctgcaccaattaacataagcggatatggatttttatccggatgtctcatcgttatttacatgtcatctaaatatttattaaaataatttgataacatggattaatatgaaatatatcactccataaacatgtaaggttaaatttaacttttacaagttgcaataaacagaacaacttaaattgaaaatagttgtcgtacattcatagttatatttgttatttttattaaaacttgtataagttaaatttttacttacatgtctgtgacatgtataaaataatgggatatccctctaagggatgaaaacgctttcccaacccaagcagctagtccgagagcaagtttggccaccacaccacttgcagatgcttgttagctttaggaaaagccagccggccggccggccaagccaagccagcaccaattaggctgcgctaggtgcagtgcaggtggcacatcacatttgtcgtctcccctcgcgcgatcgagatgcaacggtggtggtgccgtcgcgagatctctcttgatcccccgggaacccatcgtcgatttgcccggcagatgccgccatatttaccgtctagtttgcactcgccgctgcatatgcgtcccccaccgcccgacgaagacgaccttgtgccctggctgcctgcggtccggtcactttcgacgactactcgcgcgcgcctccttttataaagtacggtggcgaggagctgaggagatgctgcaacctgcaaaaactgttcgtcctgccgtcaatagaaggagaagcggtatcggttatcggtagggatgcgcctgcaaggctgcagggcggtttaaaaaatttactgcggttatgttttttttttaacaactcgcacaagacggtgcgatattctatttacaaccctggagtgtcataaccaggaaaaagaaaaaatataccaccacccacacaccggcagcgccaacacacacgacaggagaaggttagcaccggaccggccaccgctaagcgtgatcggccgccgctagaccaacaaaggagcacagacaagatcgccacagcaagggggtgccaaaacgacgtcttcaagaagagaagcgacgaaaaaccgccgccgccgtccgtcagggctcaaaggagccaagactgggttttcgcccggcaaccacccttgaggggtgagacagcacgacaacgccctcaggagggggaattaaccatcgttgtcagtccggccaaggccgagctaagttttcacccgccgctcccacctgcgaatccacggctgacgcaccgatgctccaccaccactcaaactctgccgacatgtggggcccctacaccgacgccccccgccggccagccttcgcgcgccgaagaccgcgccacacccaccggcagctccaccacgcaccgaggtcgcctcttccaccgccggccacacctctcgcgccaagccagcctcctccaccggacgcgcctcttgcgccaatccggcctccctccatcggctgcgcctctcgcgccaagccggcctccatctccgccgcccgcacctctcgcgccgagcctccgctgccatcggttgcgccactctgcgacaagccgttctccgacccctcctccaaacgatgctgcgccggtccgatgtagctgtctgccacgccctcggcaagccgtccgaggccgccatgcctcctcccaccaccgtcacggtcaccatcacctcactgtcgccgccgtcacctcacacccgactccttccccgcctccactgctgacgtcgccgccgcctcctcagtcacggccgtcgcaagccagccgccgtcgccgctgccgctgtcaccagccaccgacgccagcagccaccatcgcaaaaccgtcgccacctccaatgcagccgccctaacatcgtcgccatgcagggggagggggcaaatcggcctgcagcacgccagatccgccccccggggggccaaaacggcctgcagcgcctgatccggccgccgtcgccagcctcgccgccagagccacccgccgtcgtcagcctcgccgccacctccatccccgccgccatctccatccccgccgccggcgccccctcaccatccccgacgccatcattgcccccgccgccgtcgtcgccttccccgtcgccagccaccaccaactgccaccgccacctcgccatcttcaatccccgccgccaccaccaccaactgtcgccgccacctcaggccgaccctccgccggcggcctccccgctagatccggccgcggtggcccggatctgggcggtgtcacaccctaatccggcaccgccgtacaacggcacctgataggagcgtgtcataggaaaaacggtgcgaaacgcttcctactaaaccgcgatctcagtaccagtcccaggacatagcgctggtacccacggtgacaaatataatcattgcaatccttaaaataaatagaggacttatttaccttaacttaggttgcagctcaggatagcccgagattacaaccgacgacacggacgaggcaacaccaacaaccggcagcagcagcggaaacaatggactaacacccaacaccacaggcgacggctgggaactaggacgaaacccaaatctttgcttcaacttcatcttcagagctggcagaactatatatatatatatatatatatatatatatatatatatatatatatatatatatatatatatatatatatatatagagcaagggtgagtatttacgtactcagcaagccaggggaacttaggtggttaatgcaagcttcaagggaaggctgttatttttcaatcagttttatttgcaagcattttgacaatctaagtgtgttcattccgcgaccagagcgagacaagtctcagctcggccgagggtgaggagtgaacaatattattttatcaagatttgcacaactcccggagttggcctcaaagctggtttcccaaaccaaaccaattttccagactttcaaagttttggttgtctccaaacaaccagtcacttttagggactccctgtcccgctgtctccctgacagccacttgcctttccaaacatcaggtttcccaaaccacatcactttttcataaaacagggtaaaacaaaaactacgctaaggaatcacctcacatccacccatgaccgtgggcacggctgttcgaacagtttgttaacctctgcagagggggtagactttacccacacgacattactaacccggatcacccagcccgtggggatcagccacgtcgggagacctccaagctttcatgacaaggcatttccaaagccgacacaggtttaccatatgccgacgagaggggtccaagatcaacaacaggttaggtcccaaaccatactgtaccaggaagcccaggggtccctccccgacactaccccggcgaatccacttgtctctcggcatcaaggctcccctgattagctaattactcagccaggggtgtcccattccacccgtgtggtcgcactattgtatgctcggatgtaattgcaaaggaatcggtccttagatgcgaccgcacaagcatcccgcccaggaatggtcttgtgtcgcgagttttatttttttaaaactcattttctttcacaaggcaccgacccaggcgtcgggttttccaatccttttgtaaaccaagttttacccaagatgtttctcatttttttttagtttgaatgcgaccatcgatactcgtgtagagtgcacgaataccaaggcacgactaggcagttacaagggaacatgatatagcaattaacaatggaaggatcaaatgcaacaagttaggtatgcctaccgatctgcctcgcagacagggcaaacatattaagtgcaaacctatcaatgcataatattttgaaagcaatataattaagttcaaatataggctcaagatgttcaaaggtggcttgccttgctcagagtcttcacggagcttcgcgaatcttcgagatatccacgatcgaccgaaaatccggtaaccgcaactaagcgcaaacaatgaaaacctaaacaaaagaccaaataaaatatcctatttggactaaaataatagtgccattaaatagatctcaattttacggaattattggaagtggaacggagtcaaacggagttacggatcacgaggtatgaattttggaagtttatttgaattaagggaaatatttgtggaacaagggaaattgatttatgaaatttatagaaataatattctcaagaatattattgacaatcacttgacatgtgggaccaagggaatgaattattgaaatccggggattaagaggaaggatttatggaatttggaatataggaaatgatttatggaacaaggggaaatgattttttgaacttatggaaaagaatattcccgagaataatctgtttagtcactcattgacgtgtggggccaacaagggagatagacggacttttgtgtaagggagctgatttggtggaaggacgaaatatgaactttgattcaagagtgtgttcactgggctcggacagagggagtaaaagtggactttgttccttttggccaaggaggggggttggccgatgggcctggcccaagagcggggaggagagagggggagacggctgactgggcaggggcaggcccggtcaacgccaacgtgggcagccacgtcggatggggagagagggggggcgggaacctcatcggacggccggcgacgcttggcgcactccggtgaacggtggcgagccagaggaagtggctagcactggcggagagaggaggacaaggggaatcaattcaacggtttggatttgagagaggaggtacgacggctaccggcggcggaggcgaagctcgctggatgtccgacgtggtcgcgcgcgaggaaagcgaagggcgcataggctcgggctcggctgacgcggaaaggtattgcgatgcacacgccgtggcacggaacccaatggtcgccgacgacgcgcgcgcggcggcgctatacggcggcggaaggggcggcacggcgcgggagcgattggggaggccggcggctgaggcggcggtctaagaagggccaagagggctccaggaggtcggaggtgagaggatacggcgaggggatggccgacggcagtgcgcatccatgcgcggcggctgccagtcgagcggcacggcgcgagagcaaaatgggaggtcggcggccaggggaatggattggggaggtcgagggggccccgaggaaggtgatggcgagcgggttcgaagagagggagaccgacggtggcgcacagccgggtgcggcatcggcgaagctcgccgcggctactcgcgcagcggcgccaagcggcggtggcgagagctacacgatgcggaaaaggaaagggagtgccaaggggaaggaggagccgaggagctcaccgtcgagcggggaacggcgtcgccggacttcggtgatgggaaggggaggaaggccgatggcggcgcatggacgagcagcggcgcacggcgacaaacacgacaccgaggtggcatggtgccgtggcgggcgcaccggggaaggggacggaggcgtgcggaaacggcgtccttcgtcgcggcggtggcgttcttggccgtgacgacgaaggaggcggcggtgctccggggttggccgcgcgacgacgaccggggtcgagggaggaggcggcaatactccgttccaaggagcacggggtgaaggggaaaggattgtgggcatggggttgggattttataggcgaagaggcgctcggctggcaacagcggcggtttcgtgggcggtgcgaaagcggcgacggcgtggatgcattgggcggcgaaggcggtggatcgtgcggtgggaatcgaacagcgagcgcgggctagcgtggtcaaggtgggggcggcgagctggcatggtcgcggtggtggcgtgggcgcggtagggtgcaaaggcggcgtcagcggcaccctgtgtccgctcccgcaccaggacaagggagagagcgaggcggccttgcccgcaagggaaaaagcgaaaggaggaggaggaaagggagccttgctccttccattttgggaggaaggaagatgagagcacgagcccagcctcatggctttggacgcatgcggcatggagtagcggagccgagcggtgaacggtttggcggtgagcgagggcaagacggtcgacgcagcaggcggcaaccgagggtgatgacggcgacacccagacggtcggccacgcgcgcgagcgcgccggaacgatgggcgggaagcgatgccgagagagagagaaggcatcaagagagagagaggaaggagacgagagaggcgccgcttctctcgctcggtgcgtgcagcgcacgtgcggggggaggaggagcggccgagaggaggagatgggccgaaaagggaaaaacggcccaacgaccaagagggaggtgaaatagactttttcgggggaatttatttaaggaatttgaggagcatttgagtcgggaattggattccaatcggatatatgatcctggcaaaatatggggggtgtcatggaagggcttcaaaggcgggaattatatatttctggaatatttctgtatttggcggctcaagagttatttgagagggattcaaaaggaacctcgtattcttggagttgggacaattgtttgggaaagagttcaaagatagatagatagatggacagagagataggtcgataggtagagggacggatagacagatggattgacggatggataggtaaacagataggtaggtatagtagatagatagatggatcgatcgatagatagatagatcgctaggtagatcgatgtatagatagattgataggtagatcgatcaaaagagagagggacgaaatgaaccaatcgatgagtttgaattttgaggattgacgacaaatgcggatagggttttacaagaggaatccgaatacggaaattcgaactctcggattgttgtaggtagattgataggtctagactttagagatagggagagagatgggccggaagagaaagaagaggtggaccaggaagaaagagaaagaaggggaacccaacatcagggggagggaaaatggactttctcagagagattttagttgatggtgtttagggttggaggttggatttgaacgtcgaagttgatactcgaactcggtagaatagggaggagtcaaagaagagggcaatattcggaatcgaatcaaagggagattgttagtttagagaatgagagtgtatctcgagtgtttcaagtcgactactcgacgaggtacgtggataagggatttagaagagaaacctgaatagaagggttcggacttcaagattatctggaacggatattatcctgggatagatctgtactcggggattgttctaggattatttggatggggtttctaagagaggggaaatctcgagaattgggtttcacaaaaaggaattcaatatggatctgcacccgggtattcggagcaaatactcggaaatggtttcaacgaatgacgaagcaataggtagagggagattataaatgtgggagttgagatcaattattcgaaagagagtcaagggaaggtagagagagggagagatgaaattgagaggttaagctcgaattcgagagtcggtttgaaggaaacaagggagaatttaggtctcggaggtgaatcattggactgggttagggttcgggcattcgacaaagattagggatagggttccaggagggatttccgaatagaaggaatcgagcttcgggattatattggatggaaaattttaaggagacgatctttgataacagggtattgagacaggggagggattttaattgagatctttggcacaacttagactcagcactcaaagaatcaaaattttcgcaattagggttttcggtgcattagcttttaacgccacgcggaaatcggggcgttacaggcggccttcgctgtctcgcgcaggcccccaccgccgacgggagaggcagacgaaggcgacgaagccccgccgccgccgtccttgcggccgcgcggctttgccggcggccggtcgggcggcggcgaggcggcagagggaggaaggggggagcggcgacgccggctgtttttgcctcccgtgtcgcctgtgagggagggcgacgcgggggcgaggggaagaaaatcgcgttactgcagttatgttgtacggtaactttttggctaaggatgaaaagcaaggaaggaaagcttttcggtccaaaaccaagaaaaattttcattaatatttttaattatgatgtataacaatcttaatgttttgatttattgctcggtatttctatcactgaaaaatcgtttttacccgttcgggtattttttttttcaggctgtgtgagtcgtcacgaagtgtccgggcggcctaaccatgttccctacctggttgtagctgtcaaggagatcaagagattgtgggtagaactaaaccagcactttcttcctatgtacatagagactatagagggtatcatcggagttacctgagcgggccatttttttttttctcgtgaaggagaaagaaagcatgcgggtgggtgagagagaccggaagcatcattgctacagttgaagatgagatttgagatgagataaggccgccgtcgaagctctcaatggaaagatctaggccctcccgatgggcccagacgatcgaggagacgacggcgacggggacgggagatgaaaaggcgaccggccccggttcactgaacgcatcctttcgggataaaaccccaactttggttacagcctgggtcgcgtaattgcgcgcgcttcgcgtgcggccgtgcagtgcatgggcagcggcatggcctactcctatccagcatctccactgatcattgctgctcatggcctcaccgatcgttcgatctccggccgtggccagtcaccagtcgtcagtccgacgcagtgttccatgggagccacgtatggggggtcccgaagcgagtgcaacagtgactgggatttggctgttaaagttggcgccttcgaccaccagcccaccccgatgtgtaatcactgtgccagagtagcgtagacgaggaaaatctgctttgatgcagctcgcaactggggcaactggcttgggaagtgaactgaaatccactgcatcgggacggcgctggcggcggtggtgagcttgtggcctagttgtagtacggggtagtaggagtagtagtttaaaggagtatatcacgtcgctggtccccgactcccccgtggtcgcagcgaaatcgcaccggtcgatcggtggaagctccggccggtggagctgagctagcgatgaaaagtcgctaaaaactaaatcgaccgtatcatttcgcaaatcccgattggtccccgtggcgcagcgtggcgtgagatcttgttatactagtatttaattgggatttgggggggggggggtgcgtatgcgtgcgtgtgcgctgcttcttctctcaagtggtggaggggaagaggagcacaaggagaggcagacggcgataagtcgctcgctcgccaattcgccatgatcgggtggggctccgctaccgtacacgccccggaggaagcccaggccccgcccatgctgctgagctcgtgatcctgcgctcctggccacaggctgcgattcggcgttggtgcgcccaccctcgatcttggccgcttgcgcgcttccacgatctgagtatcctgtcgcgtactggggtcttaattaatttactagtgaccgtgctcatcttcttcttcttcctcctccttgcaggggtttctggtccgaggcggccatcaagatccgtgcttcttgtcctttggcccgggcggagtggtttctttcttgcacgggacgtgctcgacggaatgcctgtgaggggaattcgctcgctgtgagttgggaggggtggtagctgtgcttgcctgcttggtctggtcatggtggattgagtgcttgggggtggtgggatttggtccctgggcatggccggttcggagaggaccgtggtttggttcaggagggacctcaggatcgacgacaacccggcgttggcctccgcggcgagggacggcgctgtgctccctgtcttcatatggtgccctgcggatgaagggcagttctatcccggccggtgctccaggtggtggctcaagcagtcgctcccccacctcagccagtcactggagtcgctcgggtgcccgctcgtgctgatccgagccgagagtacccttgaggctcttctgcggtgcattgattctgtcggcgccaccagattggtttataatcatctgtatggtatggctactttctcatggcgtttcctgcatcaatggagtttcttatatgttgtgttattctatttctttgtgaaaatatttttttttctttacactttggatgcgaagaaatctgaccatgacgactttgaaagtcttagccagctacatcatgtacttttatgttgtcaaaaggctcaacttaataagttatgtaacatttgatcaaaagctattccgagtgaagccttgtaaacaacatcatagatcttttttttttaagaaaatggattaaaatcatagatcatgccagttgcttacatgctgttctaaatgtaaatacagtagaaagttctctcaatttatccatggttatgtatcataagtcagttcatttagttggtattgacatgatatgtgctacaaacatcactaatacacattttccccacaaatataaaaaatattcaaattcatatataggaagaaggaaactatctctaaacaattaaaattgcattatatgtagtaatctggcagtagtttttcctatcaaaaattcataacaatagctttcgaaaagaataaggcaaaaagcatatgcgcatgaaaatagaaactaggccaagtatgattaacataaatacttcctccgtttcatattataagactttctagcattgcccacattcatatatatgttaataaatctagatatatatgtgtgcctagattcattaatatctatatgaatgtgggcaatgttagaaaatcttataacctgaaacggaggtagtactacataataaagtgccaaataaatctttaggggctaacttgaaccaactatagcttatggtcttatttgtcatagttccactcttcaaatatcaaataccaaatactataaactgtcacatcagaggggaaaatcaaactcaaaggtttgacattgcaaaatgagacggccttttccatttgagctagtacaatattgatatgaaataaacaactttgggttttctagttcagacttcagaaacgtgtacctctaaagttggtacggagtacagctgtgttctctattgttccattccactagcagttttgttttaaaattactcttttcagatatgctggtttaatcttatttgttctcactcttctaaattttagaccctgtttctcttgtgcgtgatgacaaaataaaaaaagagctttcggcactgggaatttccatccagagttttaatggtgatctgctgtatgagccatgggaaatttatgatgatagtggacttgcatttacaacctttaacatgtactgggagaagtgcatggaattacctattgacgcatcaccgtcacttgcaccttggaaattggtgcctgtcccaggtagatcgtggctagtggcctaccattatttatcttttttatttttgaagattttctatgtttttaatttgtctgtacttacagaattatctctagattaagttgtttaccttttttcgagaagttatttacttgcaagcattactcgttttatatttacagatttagtaattgatgcccttcaacctttacactcaatgagtcaatgtctagtttgtcaagatacagctactttaatgcttaacaatttttcagtttgacattcaggtttggagagtgttcgtagctgttctgttgatgacctaggacttgaatcaagcaaggatgaggaatcaagtaatgctttgctaatgagggcctggtctcctggttggcgcaatgcagaaaagatgcttgaagaatttgtctcccatggtctcctagaatactcaaaacatggaatgaaggttgagggagctactacatcattgctatcaccatatcttcattttggtgaggtgagtgtaagaaaagtatatcaacttgtaaggatgcaacaaatcaagtgggaaaatgagggaacatctgaagctgaggagagcattcacttcttcatgcggtcaattggtcttcgagaatattcacggtacttgtgttttaacttcccattcacacatgaaaagtcattgctggggaacttgaaacactacccttggaaagtagatgaggagcggttcaagtcctggaggcagggaatgacaggatacccattggtagatgctggcatgagggaactttgggctaccggatggacacataatcggataagagttatcatttcaagttttgctgtgaaatttctacttatcccatggacttggggtatgaagtatttttgggatgtgctattggatgctgatctggaaagtgatattcttggttggcagtacatatctgggagcctgcctgatggccatgagctcagtcgtcttgataatccagaggtatgcagtcactaaagcacaaaatcctttttttttttttttttttgctatcaggtaagcttgattaaggcatgcttggtctttaccacattttcgatggcccttgtgcaaaaatgtcgcttgacacagtatttatggtaatcaagtcacccaccacacttgggacatgaaccaaactagccatactttatcgaatttgcttacattgatgtggcaaactgtggcattaaactaaatacaggaatttaggaatttctcttcattagaaagttcatatatgatgagactagaatagatttttatatccatgaaattctccacagatcatccacatttcactattcagttaaaaggtgttgaagagaaacagctcaaggaaaacgttagttaaaagaattctgactgtagtgtagttactaacctaggcaaacttttcctggcttggctgaggcataaaactgagctaggatttgcacccttggagtgggaagcaaatgatttttaggtatgccaccttactatttgtttttctataaaatgccatgtgcacgtttgtcatactctcactgagtggcattctagaactttactttatcacaaatggagtgacactcaatcaagtaattctacataaagagcaagctgaattttgttttttccctctaaaagacagtggctgccaggccaagcttgcgaacctaattgtgtactgacgagatcatagcccagcggcctcagccaacttgaaaaataacttggcatggccagcatatgttgccttattttttttccctttaacaagggtcgatatgatgaaacttaaattggcacagatagtatattttggttattgtagtttggttttcattgttcttgtagattatggaaaatgtgattgctacgtattatgccttgtgcatatggtattaatatatgtgattttactgtttctgccatccaccctacaattttcccttgtcacttgtataatgtattgtctataatcaaaattttacgatatatggtttaccttggcacttcctacagatgcattgacaaaactttgtggccttcctttctgcttagttttcaacttgtgattttttgaagtttcactgtactattaggcagaagagctcccttgtgttatacttattttatgtgtctaagtaccaagtgttttatccatgacatgcaagatatttatgtttccctatttggcttttttgatgcaaaactaggttcaaggtcaaaagtatgacccagatggtgtatatgtaagaacttggatacctgaactagctagaatgccgacagaatggattcatcatccatgggatgcaccgagctgtattcttgaagttgctggagttgagctggggtttaactatcctaagccaatcgtagaccttcacattgctagggagtgtttagatgattccatctccacgatgtggcaattggatacagctgagaaacttgcagaattagatggtgaggttgtggaggacaacttgagcaatatcaagacttttgacatcccaaaagttgttttgagggaaacatctccatgtgctttgcccattgatcaaagagtgccccatgctagcagcaaggatcataatttaaagtcaaaggtattgaaggcctcaaatagaagttctatttgtgttgatatgatcaggtcctcaaagatggaagcaacgagctctgtagcaaactcaccggtatcaaggaaaagatccttttgtgagactgcatttcatgtcccatcttattcatcttcagctgaagtgcattcgcatattcaagatcatggtggttccttagttgggccttcaagatatctcctgcaggaagcaggtagaaactatgttgatgaggtaagcttaatcatcatatttgatagacaagtgctgaaaaatttaatgcgatattttcatctttgtagttttttttatcaggaaagcaaacatcccatgaaattaccaccacaagacctataaacataataacattcaacctccaaagtactaggtttaaagtttaaacagcttcgaacactccatgatatagatggtattctgaagttgtgtcttctgcttctttacagccaacatgaactgtgtggagcgcctgtatcgtgatcttagctaatcttaattctgacaacagcttctgctataatgacaaactcatgatatattattgctgcaagctgaccagcttctgtcggcataaatggctttattggataatctaggtgctcaggatgggtagtggaaacccacccatttcacacttccactgcttctagaactaagtctaacaagtcttgataggattagtaaaactgtgcaagtctttgtagtcaaatttcacggcatgtatatttcagtagatattgctggaggtaaagcctccatcgagaaacaagatagcacccaacctatgtttaactatgatactttttctggcatctttttgggattttttgtaggggcatcttttgggattttacttctgtgtgtataccacgggcacaaattctctgctcagtaaattaacagccacggcattgaaccattatttgcatgtcttatctatgcataacatcctatccccacttaactgaccatacatgttactctacactgcttgactgcttcacatccaaactaatgccactttgcaggtagaagatagctctaccgcagatagtggttcgagcatttcaagacaacgaaaagccgcatagttgctctgcttgacaaggaagggtgaaggtgtactcaactaagggtgtgtaggagtaaaacttgtgtgatcataaggaaattttgtacattctgtaatctgtttatttttgctttttgtgacacattctgtaactagctgagaactgagctgacacggtttcctcgcccaaaagaaaaaaaaaatgcaacatctttccttcgttgcaataagagaaacttctcatccagtggggttccagtccctttgtttttgtttgtttaatgcttgttttatacctgacttagatggtcaaatatattcagtggagtatttgacaggttttgatcaaaaggacaaattagcagatggaatttatgcgacgatatcatgcaagggtcatcaaaaaaatcatggtagtccctgatctatggtatcaaatctgataatagtctaatctagcaaatctggtattagtgtaatctagcattggtattgttgtgaccttaggtcatggacaagtttagagataaacgggaatgtttgatggttaatacacataaaatacatggctttgatggttaatacacaaaatgcctgctagaggcttttggccggtttatatagtccacagccgtacatgtgagattataactttgcccccgtgggccctttgagtttacaattaggccattgccatgtcagcaaccctagaggcattttggtatatttagaaggttattatggtcttttggcgccagctggcaggagtggttcccatggaatcttcttttggcatctttattgttcgaattgtgttttccctcgagtcgttaagtcgaatcgtatttttcatcttggttcgttttttccatcttgagagctcgaacacttcttctcacctgcctagctcttgaaatctacctgtcactggttagaaatgtactcagacgagacgagttgtttcataaagctactcaaatggtactttcccacttgaatagtacttttccgctcgaatggcacttaaccatttttaccactcaaatggtattttaccattttaccactcgtatgatattttaccaccttaacacttagaaaagctcaagacctctttctctttagtgtttaagccgaatagggaggatggtgggctacaacactgataaagaacatatgttagatttattgtactaggtaaatatcttgtttagattggtttaaggctgctttattttagagtagagaaataagtttcatgttgacatctgcatatgaattagagtggattacactttgggtcattttttattacctaaatttcactttggaccaatatctatccaaacttttcaccttgaactagatatttttaccaattttgtattttggatcacccgaactctcttcacgagcacaacagcaaaatcaagcacattggcactctcgtgtcgacgatattccttattttagtggagctcacatctttatcaaataaaaggttggatatggctagacaaaatgggtggtctaaagcgtaacaaaggtaaaaatacctagcccaaaatgaaaagattggatagagggtgcttcaaagtgaaatttagataataaaaaggtggccaaaagtgcaattcgctctataaattatttcacccactaacggcattacccttatatagtactttctccatctcataataagtttatttttaaacctccttatttgtcccaaaaataagttcatttataagttatcaccgcatcggagtttgtcaaaatatggtataaatgtaccgagagtagataaagagagaaataattgcattgagatttaataaagtatagatattgcactgaaaataaagttattttgggacagaggaagtatatatatatttgtttggtcaaatggggaaataaggccagtatcttcttgtatgagatcctgaccgttcatcctcgatcggacgagccatgccactcatagaacagatcgcaaattcgcaatcggtttcgttgcctcccccatggcgagcgtccgtaccgagcggctcgcgtcgtgcctcgccgccgtggccaccaaaccggccgacttccgccgcgcgcacgccatcctcctcacctccggccacctctcctcccgctactccgtcaactgcctcatccgcgccgcctccgccccctccgcctccgcccttctccttcgtttcctcctcaaccaccgcctcctgccggaccacctgtccctctccttttccctccacccctgctcccgcctcccgagccaccccgtcgccagcgtcgtccactccctcgccgtcaggctcggccacgcccgcgacgtctacgttgtcaacgccgccgcctccgcctacttcgccgccgccgacgtcgcctccgccgagcggctcttctcggaggcgtccagggatgtcgccgacgtcgttacgtggaccacgatggtcaccgggcacgccaacgccggcgacgtcgagcgtgcgaggtggttcttcgacgccatgcccgagaagaacgtggtgtcgtggaacacgatgctgggcgcgtacgcccgcgccgggatgctgccgaaggcgcggaagctgttcgaccgaatgcccagccggaacgctgccacgtggggctcgatgatcaccggcctcttgcagtccgaccactgcgaggaggcgttgagggtgttcagcgacatggtcgcgagcggcgtcgtgccgaacgagcctgcgctggtgagcaccgtctcggcatgcacgcagctgaggtggatggaacacggcacgtgggtgcacgggtacgccgagcgagagctgaacggggcgatgagcgctgtccttgcgacggcgatcgtagacatgtatggcaaatgtgggagcatccgtgatgccgtcagggtgttcgctgcaatgccggtgagaaacatctactcgtggaactcaatgatcgctgggcttgccatgaacggcagcgagaggcaggccctgtcactcttctggaagatgcagctggctggtgttcgaccaaatgacataacattcattggtttgctgagcgcttgcagccactcaggtcttgtagacgagggccgctggttgttctacaagatggtgaatcactttgggatccagccagtcccagagcactatggtctcatggttgatttgcttgggcggtccggtcatgtcagggaggcagtggatttcgtcaagagcatgcctgtggagccacacccaggcttatggggtgcacttgctggcgcctgcaagatccatggcgaggtggagctcggtgaggaggttgccaagaagctcattgagttggagcctcagcatggcagccggtacatcctcctgtcaaacatatatgccacctcgaacagatgggatgacatggctaatgtgcgcaggatcctgaaggatcgcaaggtccccaagggtacaggcaatgccatagttggaaatgattctcagtcttcaggatatgaaatcgattcgtgattagtgcttctttggactgagaagtgcattcagtgtgactttgcacaagctgcgtgtggtagggagggatgaaccaccaccttggagacaccattgtactgaaacaagcccccctaaggatattacttttatggggcatttggaaagtgcataacgggatatattctcagcattcttgatgggttagtttgcaagtgcttggagaaaaaacactcagattatgaagaaatggtgaccaagggaagaaccaccaccttggagacaccattgtactgaaacaagcccccctaaggatattactttcatggggcatttggaaagtgcataacggggtacattgttggtagagacggatcacttcattggaattttcaagagcactgtactcggcgtcacaatttccttgaagatgtactactagattttgagatttgagaattactggataaaacttttgaaagccttgatgctaattcgtttctctgttcctgttccagtgctccattcaacttttggctttattttcctgcaagtaggagagttgaaagatagcggtgctgcaatggtctttctgtggtcattgggctgatacatcgaggctgtgatatcatgtttctggcttcattttcagtaaaatggaaatggtaccacgagtctatgctcttttcttccatgataaagaatgacatgtttgtttgagatatgccatctaaaaggtgaaaggtgactcatcgggaattacaaaacaagtgtgttatatgtatagtgaaatagtatgaaggaaagaaaagataaatattttaataggtttattatttataaggaactcatggtgttaacataatttacagcaatctgtcattatgctctgagtaaaaatatatcttggttttcctcacgtgaacatgatcattttcggaacaatctgctgaatgacagaactggtggagattgtgtgttcccttaaaggtcatggataatctaggaactgattgcatttctcaaataactgagactctgcttcttcttctttttctcacgagaagccattgaagtgttcgtgaagttcggtggatatgagtggagtaatattctcatagcagcatcagtatcttgacagatgctcaatcattcactgacatacgtgatgatgaaatctttgctactttctccattccaaaatataagatactctagtttagttttgttatctatactaatttatatgttgatagtggtggttgcagtgaatctgccatcaccaccccttccactgacgtgtggacccacaatgttggtggtgttggtgtttcatcctgaaacaatatacctcagtgtctttggctctctagctaactcaataagcataaaaaaaatggatggccaaaaaatggttggataggtagatattttttactttaaaatgaatgctaaagttttttttctaagatttcatggtaacgcatgggcaaatcagctagtaaattaaacttttctaactttaatatctacatcatcaaattagttccattaatatctatattggtaatatatttgttttgtattgaagatgttaattacttttttcataaacttagttaaagttaaaaaaaataatttagaacaaaaactaaaacaacttatattttagaaagggtaatatttggccagaacgttgatgctcatgttgtaagttgtcgcagagatgtattggaattggcccagttatttcatggccaagaaggtactggcccatatcggacagcacagtgtgatcgaacagattgcagctgaatcgaaccatgttgggctgttggctgtacctcctccagaaatccccccccccccccccctcccctcactcactcatatctcacttctcggtgaaatatgagttggctgtacctctctctctctcactcactcataattcacttctcggtgtataatcacgtcattggcaactcgccagcaagattcagaccatgtttagttcaggggaaaagtttttacgtgtcacatcggctatacgaacacacctttaaagtattaaatgtagtctataatagattccgcttataaactgcgagacgaatttattaagcctaattaatccgtcattagcaaatgtttactgtagcacattgtcaaatcatggagtaattaggcttaaaaatttcgtctcgcaatctgtataattaattattttttatattaaataatccgtacatatatctaaacattcgaacggggtgaaaaatttttgtttgggaactaagcaagacctcagccagtgtgcccgctctaggaagactttacaggcttacagcctagccaaccgaacaagctgcacgtttcagccccttcggctgtggccaacggcctccgggctcccgcctcccgctagccctctacacgcgcgaggtgatccgtggtctctgtggtctggtcatctggcgagccacgtcgcgaggggcgcacaaacaaacagggctgccggtcaatcggttgcccttgcccgcgccgagaagccgcgcggtcacggcacgcaccccgtgctccgcgctccgcgtgcgcgcgcgcgcgcgtgtcgtgtcgaccgggcgcttggcctgaggtgagagaggaggacacgtactgttcgggggcgtgcggcgttgggggcgacgtgcacgcgagacgccacagtactgcaccgtgcacgtcatggcggcctggtaaccgcgcgcggaagggttctttttctgtgtacgcgagtggccaacgctcgcttgcgttgcgttggttcgcacgctgcgtatcagcgtgtgtgtggaggacggaaattggaaaaccgatcgtgccgaagaaattactcggatggtgcattcgcatgcgcgtgcggcgtgcttacctctggcggttggccgcggctcggtcgatctgtgctgcaaaagcgaccatcgggcgggctagtccgatttttgcctggtcgaagttctcgcggaaagaaaagacgactgggttttcctgatcatttagcagtacaggctgcttttggagaagagagaaaggtgtactaattaagctcaaagatgccggtattgttctttcatgcgtgattaattaagctttcttgacttgcaggatatcagccgtcatacatacccaataagttgtctatcagatcattagcacttatgtccgtcctccatttttcttctttgattctactattacatttaattgtaggagttctttctttgggcacgaaaaaggcagcacgtaccacttgtgacctcggatgtctgattagcactaatttcacgccttacacgacataggtgatgcctttttctacttcaattaattataccatagtcttacgggtctctgcattgtcaagttatcacgcaagaagatgctttaatccaccataatatgtactgtagcgtgttgtgatgtcaaagaagggctgcgtcgctgcgagcatacttccccggaagaccgcaataggccgagaatttatgggtcttcagagatcggcgttcaacaagggaacaattattggtatattcgacgaacaaattcttgcgtgttttttcttctccaagtgcagagttcgccatgtgttgttgttgggcgacattgaccagctgttgcgtcggcatcaggaagagagagggagagaatgcaatggagaacgtcatcttaagaatgtaagaccgtggcagcgtcacgcgtgagatcagccaaagttgccgtcaaactgatacgttgaaactttgggagcgagaagaactagctagccggaaatttggtcgatcagttatcttgccaattaatttaagttaatttaatttggccggtcgacgtttcttcaaaggtgtacatcgcggtttgaaacgaaccatggaatgatggaattcaccgtccggacttcttgtaaatctttttgaagtctcgcttccggacggttccattaggtcaacgagtttttctccgaagatttttttggtgccctaccccatgcttgttgggttgtgctgacgattgaatgcggatacgccatataataaatcgactggagcggccataatttttattttgaactattagcaccagatagtgtaatgattcattgaatatagcaggaaaaaatacaagactagtgtccggtaaggcagtaaccaggaaagaaaaaaaccaccactaccaccatcacacaccgacagctcctacacacagacaagagaaggctagtatcggaccagccgtcgctagacgaagaaagaagctaaagtcgagtcagcccaaaaccaaaccctaacacccggccaccgaactctatcctatccacatttttaggattaaggaggagaaggtgagagagaatatggaaccgctctccccctaaggctcaccaatacggccaacttacagaagctagggtaccaccgcaagcggacaggcgtctagagtgagccagcaccaactgcacgagagaagattggcaaggggcttccaagacaacgtctctaaggagaagagtgacgataagatcgccgccgccatccgtcgaggcctcagggagaccacgacagggtttttacccgacagcccaaccagaggaagtggacagctcgacaatgcccacaagagggaagatgacgcctgaagcgtcgtcattgtcggccctgtcccaagctaggtttccacccgccgtccacccccaccgatccacagctagtgctccaaacctccaccaccagctaacctctgccagcgcatggactccactgcaccgacgccccctgctggccagcctcccatcgacaccggctgcacctcgccggcctccacaccgccggacacttccacatgccgcacctgcctcccgccgccgttggccacacatccacgcgccatcgtcggcatcccgccgccactggccgcacatccacgcgccatcgtcggcctccacgccgttggccgcgcctccacgtgccgagccggcctccacaccgccagccagccttgcctccacgctcctccacgcgccaccaccaccggagcaacgcctcctctgctcccgttgccgcctgcatccacaccgcctgccaccgcccgccgcctcctttcccgcacctagctctagatccggcgatgcccgagggcgcagtctccgccgtcaccgccttcacccatggcccataccccgaggagcgtggagcggccacaatggctgcagctactatagggataatgggtctttacaatagcaaatttggagtattgtaacttagcagtatcggatctctaccgcagaccgaaaataacgtattggaacttagtgatcactatagcatttagcgattgctattgcaacctatattggcttttggcaggtcgctattgcgaaattatgtttttcataattggatatgggaacttaatgccatgtgtcttttttaaaaaaaaatcttattcatttatattattttgtaacttttatctatactactttaaaagcagaggccggtggacttctccttccaccaccatcatatagtaagcacacgggcaaaaatcacagatgtatcactatcattttttacttagtcttatgtcacgcactctcttcatcccacaaaaactcaacttagtatttgatgttagacaagttatagtactacgaatctggacagacctttgttcaaatttatagtataacttgttatggaacagagagagtatattatatatagtataggacctcgtatattcggtagttaggggatctttttattctattggtggttgttagtttgtgtctgcttttagctttgtttttgttatcgtgaactttttgtgtgctatagtgaagtttctgtgtgagttttataataattagcggtagctctttgagtaaaggccgggatatttcattccattatcctaaaatattcatactgctagttcactagaaacaagagtttgtcatgtatggtgtcaatgctgaaactactgcctccgtcctaaattggttgtcgctttaacgtttgaccattcgtcttatttgaaaaactaatacaaatataaaaaagataagtcaaacttagaatattttttataataaagcaagacacaaacaaaataaataataatttcatatttttttaaaaaagacgaatgatcaaaagttagaaaaaaaactcaaagcgacaagtattttaggatgaaggcagtatattatactgagattcttctcgaagttggagaaaatctgtgaaaacaacacttgtgtttacaatattagcttaccaatatataatccacaaacttatagattttgaagggaaatttaataccgatgttattaaccacacacacaaagctaatctctctcttctcaagtacggcagcttttttttgctgacaaaaaaaatcccatcctaacaacccctacatatacagcattaacaaagttacatatacaaataaaaaaacagaaagattttcttagcaaccaatctgacaactgtacatgccagcagtactggtacattgtccactttgaaaattataaaccggagttatttttatatgagcacatgtctcagcaagtacaccttttgaaacccccctgcttaaatccacaggaacaacaacaaatcaacctgaatacagctataaacacacactagtacaggagtagtatcttattatagctactaaaaacaatgaatatattttgattctcaagaatctcaacttacatgtagtgtcaggctatattcaacacctatgatggatgctgcataatacagtttacttctactgtagaatatgaacattagtacagtaaacacactaatagcaggctattaaccagctgcaaacatattttaatgagataaaagatgagagagaagagcagcgggctacagatatgtagcccgctgcagcgcggactccaagacgcagtgtgtgtatgacaggtgagatcatatattaatagtatagtaaacaactattgtatgaattggctattagattggctatagatgaattggagcttgtagtgggctatactattaaacttgctctatcacctcacatgtccacttgtgacaagaaaacgatgaacacaacaacacaagctttccagaggaggaccttgtctagctgtctttacaaatttcccctaacgaattgattagtagaccctacacttcactagtgcgccatataataccaagattcttgtttaatcaaagccgtacaagccaaagccggcaaagtcccccaccgaaaaccgaaaaccaaaaccggagacgccgcgatagccggattttagccacgtcgccgtacaacacccgcctatataagccaccgtccatatcaaaacggcacggcgtcacacgccgtcaccgtctccaaacgggaaaagagagacaaggcccccgtcttccgtggtcagtggccacctcgcgcgcgcacgcgtcgcgctgcgattggctgcccgtcgcgccggacagcgacgtgtcgtgacgggattggtcaccgcgttctccgtacgttggccgtccggaaaggccaaaaggtccccccccccattagaaaagacggccgaaaccttctcgaagggacgttaaaacggacggtgtggtggtggtggtgggcccccacgtgaaacgccgggcgtggatgccgcgtccgcttatcaccatttaatacaccgtacgtggggcccacaggacagcgaggcgtgtgggccccacataaattaaagccgtctgcttcggggagtgtggggggggggggtgatggctgctccgcgcctcgcactttgcacacctaacgtgcagcgcagcagatgaacaacttgcgattaaacaaggctgctggtgttagcggaaaacaatgtgtttaggctacctaatcagattccgagagctcacattctaaaaccccaaagaatatactgtaatgatttttatcattgacattacgtagaagacaaagcttcgatggcccgtgaatgaatttccaccgggcggttgagttgaggtagcgtacgattttcctcggcgaaatcatgttcattttgagcctggcggaatctcgtttttctttctttctttctttttttaaaaacgtcaattgcttccattatctggacttatgggtatgcattattggtacgagcgggcagtggccactcagaatacactttccgatcaaaaagggcatgctatcgaagcatgagcggtttcgcactcgctagcctctccattaattaggagctgccatcaatcaacttatcaaccgctgtgacagcagaatgaaatttggtgattgactacgatcgttgcaatcaatttaatcgataattgggtaattttgcatcgtaaaaaagaaaaagaaaagaaatgcaaatccagagcaaggaatccgaattgaaacacaaacaacacctcggtgcaaccaaagtttatcatcccccccggtgcacgcactacaaggaaaggcgtcgttctgaaattccaactctacccactttcaatttttttaagcatctttcagttgtaatatgttgtctattcacttaaaggcacatgatgcgcaaccgaagagagatcagaaagaaaacaaaattatggtacgtggaggcatctccacttgctttcaagttaaggaatgatattaaacttatcaactcaaagatttactgtattacattttaggtgtttatatgtttgttttcaaagcaacaagtggataggcctgtttagttaagcattgtgatgacttttttttatggttaatacaataccagtacataaacaacaacaatataccttaaagtcattccttctttaatcaaagatattgtagaaatatgctatgcccatttaacttcacaacacatctcattgtttgttaccaaatccggtttacaccattttactcgtgtcctatttttaccgtttatacaactattaacttaattaatgtttaccatattatagttggaaataatttatctggtagtttttcttcccataaaaatgtaattttatgggctcctttggaacgcatgatctttaaacacacagaaacaggaaaatacaggatttaaatgccttgacaccccaaattctatggattaaaaaatacagggaaactgcaggaataaccacttcgatatagcacatgaaaaacatgggaaccaggagagagataggcaaaaatgattttcttttcaagaggttgaagctcatgttagaattgtattaaaattcttatgtcttgagctaatccaaaggattttaatttgatttttaagctatttcatatgatccaagcgatgacataggaatttttatttgtagaattgaattcctctaaaattccttcaaaaatcctttgtccaaaggagccctatatttatttttttaaaaaataagtaatcatagtagtcatatgtctcattagattaagctaaggacaattgtgactagtactaaatgaaactaaaagggatcaaagggcaaaatgggaaagacataaagtgctggaggttcagccaggcaggatccgaatattccgctggagcgtcgttaaatagaccaccaatcggtgggatggagtttacccccaaaatcacaggaaaaactactagcatgagtggagagctgaagagagactacgagattggcgaggagatcgggcgcggccgcttcggcgtggtccaccgctgcacgtcgcgcgccaccggcgaggccttcgccgtcaagtccgtcgaccgctcgcagctggccgacgacctcgaccgggagctcgcggagctcgagcccaagctggcccagctggccgccgcgggcaacccgggcgtcgtccaggtgcacgccgtgtacgaggacgacgcgtggacgcacatggtcatggacctctgctccggccccgacctgctcgactggatccgcctccgccgcggcgcgcccgtcccggagcccgtcgccgccgccgtcgtcgcgcagctcgcggaggcgctcgcgcactgccaccgccgcggggtcgcccaccgcgacgtcaagcccgacaacatcctcctcgacgtcgtcgacgacgggatcgacggcggcggcacgccgcgcgcgcggctcgcggacttcgggtcggccgcgtgggtcggggagagcggcggcagcgccgagggcctcgtggggacgccccactacgtggcgcccgaggtcgtcgccggcggggagtacggcgagaaggccgacgtgtggagcgccggggtggtcctctacgtgctcctctccggcggcgccctccccttcggcggcgagaccgccgccgaggtgctcgcctccgtcctccgtggcagcgtcaggttcccgcctaggctgttcgccggcgtgtccccggcggccaaggacctcatgaggcgcatgatgtgccgcgacacctggaggcgcttctccgccgagcaagtcctcggtaagaacaacccaaccaaatcctcgaaatcttcatggatttcacctcattttccgcccagtttccgatccaagagaacaaaccatcttatcgcttgccgcgctgttcgtaatgcaggtcacccgtggatcgtgagcggcggaggagcccgagcgatggagcagccaacctgaacggcggccgcgtccacgtcaagagggggcagacagaggcagcgaatcagtcggtgccacgtgtcgccgtagtcctagggagatacggcgatattttacagccgtagtctatacggttttgtatatacgacgagacggtagagagagatccctgcagcggatccgctgtagggtgtcgcggtattgcagatctgcagtagagagaataatcagagtattgattgaagaagaagctcgtgcagtcatgctaggcttcttttttctttcacggttccaggtttgctctgtctctagagagatcagagagccttaattttcgctttgtttttttttgtatgatgatgagtcaggttgtatatacgctaacgtaagtactaagcttttgtacaaatcgatcggagttgaataaaaatcgggcttgtgctctgcttcggcttccgtttttttcttctcaatcattttcgtccggttggcctttcggccggtccatgcctggacgtggaaaaaaaatggagatgaacaaaaacaattctactcgcatcagcgttccattcagagcatagaaataaggagggagagaccgagattctgagtcacttgacacagcagtctgcctttacgctgagcatgactgtttttttcaccatttttatgtgaaggagactctaattcatgtctcctgatcagcctcacaaaagtgttccactgatcgccgcacgctaatctccaacgaacgttcaaaggattgaggtgaaacacgcagagtactggatttttttccttcaccgtacaagacgaggtgaagatgacccgggccggtgactgactgacaaggatcccaccaccaccaccggcgatttcctcgcctttcacctgtcccctcctctcccaatctgctccacactttccactcacacttcttccccaccactcatccaactcccccaactcgtttttcccctttgccccttttcttcgcttgcaagaagagatacagtagcagagtactgtacggttggtactgtgcatctcgccccgcggcagcgacgtcacgtgtgtcccgtcccacttggcgtcctcgcgaaggtggggttttgtgcgcgcgcgcgcggcatattccgcggtttatcccgccccgtcctcgtctcgcaccaagcgcgcagctgtcgccgtccgcgttttttttttcctctcgttgcctgcttggtttgcaatggcaagcaaaaaacctgtgggattcggaggaatccctgaggcggcacgcggggcggcgcggccggaacggctggtcgtacggcctcgcacgcggccgcagcataggttcgcacgctttttgaccgagccgtgtggctggagtataagcagttgggggcgagatgatagggtggtgcccttattctggtggacgtctctctccgaatctccggtgggcggtggccctccggccaggtgtaaccgtggaatccgacgccgccaccgccaataatggaggagctgaagccgcagctaggctgcctgcctgctggcagtttctccaggtgtgccagcggctagcggcagaccaaatctcccatatctttgcgatcaaacctaactttgggagtggagtagataatttaggtgcctttttttaatagatttagattatgattgttgaaataacttggttcccccccccccccccccctctcccccggagaatggtggcatcagtgcatcaccacagtgtgttactgctgctggtcccggtcagttgggacttgggagagtataaaatttgtgatcgctttcgtcgttcagtgtcatagtgggatcaatcatctatgcgcttatctcacgttaccgcggtctccttcctattaaattcatcgatctaaagcagcgccagttcaatcggctcgagtttagttccaaaatttttcttcaaacttttaactttttcatcacatcaaaacttttctacacacacaaacttctaatttttccatcacattgttccaatttcaactaaacttctaattttagcgtgaacgaaacacaccctcagttttccttcttgatttcctaaatttttttaatttgcaggcagtaaaatgttgagtttattcgcgcggtcggtgctgagtcctggccatgtactggagtagtactacttcccaaggacgagctatcggttcaccatgacacacatgacaaaatgtacttttgctctatttcgtggtgttcctcgatggtggcggacgagaaaaaaaaatggtactccctccgtcccacaatataagggattttgagtttttattgcaaagtttgactactcgtcttattcaattttttttgcaaatataaaaaacgaaaagttatgattaaagtactgtagataataaagtaattcacaaataaaataaataataattttaaaaagatttaaataagacgagtagtcaaacgttacaaataaaaactcaaaatcccttatgttatgggatggagggagtacatcctggggatgccgagttgctgactgattcacgacgagtttagtattgccacgccaaaagccagctgatagcgtgtaaaatcacgctagaagttactaattaatcacctttttttaaaaaccctactaatcaccttcaattcggagaaaaacgagtaacccagaaagtttgatgccaattcgctgctaattgagacgcgagatgcccacggaaagccgttacacgtatcgattccgttcgtgtataatcgcgtgggaaattgaatgggatcgtcgcagcatcagctgcagcatatatatgcggtgagccggccgggtgacacatacagtgttttcaggcattactccgtacacacatggcctagttagctaaaccaaacgtgtcatcgtcatgacgaatcgaactgaagcgcttagtgtgatagatacgattagctactatggcttccttgcccttatccgtttatcacctcgatcgatcagtggagttgcgggccacgaacttatcaacatatcgaatgcgacacgacacgatatgatagccgaggtactagtagtactgtatgattgattaaattaattatgcgacgaatcagagcggatcggaaagcgccaacagcttccactacccatcaattgccatgtgggggggggggggggggtgaaggacggagagggggacatgtcacgttgcgttgggtgccagcggccggtcacctcggcgttcgggccccggcacgtgggcgctgtcgctgccagcgcagctagcgggacaccaatcagcgatcacccgggtgtgcaacaaaagcgagcgagcgagccagcaaaaccaacaaatacgcacgtactccgcgcgtacggcgacatctcgcgcgctcgtctcggccgcggctctcgttttccggcgggtacagcgacaaaggccgaagtcgagcgccttctcctctcgcttatccttaaacaccatcgttggagaaagcccgaggtcgatggagaccggacgacgcttggtctgaacgtctcgttcctttgcagcagtgcccgtggcctaacccgacgacacgcatgtatactccgtactactgctagaactaggtactggaattagtactcctccgatgcatcgcaatcagcgtgtcgacgacgatgagcaccagatcaactagcctctactagctcgatggggtactcgcatgaacgattttcgtgtgctttacgtcttttcggaaattgggtgacgcgcgaacttcaccaatggagacaggattaggaggataccacactgagagcctttgaggttcggagctctgaactttctgaaggacagctgctttcgacgaatagctgggcatgaggacatcaggggactccttttctgttacggacgaacagaaaaaaagggcgggagtttagtactttggtatacgtgcactccagctagctacttgcgatttgtttgctcttttgctcggtcgatccaccacgcacgctcaggttaggttcggttcggtgcatttccttctcagtactgacgcgttttctggttgtctctttgctcctttttcttttctcaggtaacttatcgcaatatcgcatacctttctgggtgtaagtgttgtgactgtttcatgatcaaagctggtatcgatggccattgtggcattgtagcataagaaaatggtcgggtaacatgtcaattttacgcggtgaagataaaggctggtctgaagttgcgtgccacagattgtcagtcgagcacttcttgttccaaatcgttatgactcacaccgaagaacccaagtggataaagtggtgtttcttgggcttcatgatgcgacaagtattgtattggcctattgagaaaacggggcaaaatgttgggaatggataagattgtgtgtttctttttttgaggtttgtgtttctgtttcggacaataaaaaaagttgttgtgattgtatatttgcaattttcctagattacagaaaacacacccattggactagttggggatcaccatgtagagcacgcttctatctgcattgggctaaattttgtggaatctgggctctcccacctgaaaatgcttaaatgcatcgtcaaagcataaggctttcttcagtctgcattttcttcggccgagcagatcctctgcagaaaaacgcacaccctgaggaatcatcaagtcgctagacgaatgggtagctttctgttcggcattcatcttatatctagttgggctgaaaattggcgcaacaaccagcccgctcaccaattataaacatatacgtcattaaatacgataagagcaaaagagaaattgcagaacagtaaatatgaccaaaacaacacaccgattggcaattgtgccttataccgagaataaagtaaggtttgcagcagtgaaacaaaaatcacggcaaaaaaatattggccggatcatatggaaagcctcgagatggtacaggtagaacacaccaaaccactagtaggttggatgtgcgaataattgttcctcaatatgtggttgggttagccctagttgaaatcaggcttctcagggtaagtgcagccagaacgctggatgataacatttgcggcatagcaaccagccttcacagagtcctcaatgctcttttgttgaaccaattgtgagaggaagcctccaacaaaggcatcacctaagaataaagggagggtagcttatcaggaacagtagacaaaatgaataggaacttatcagacagcctccagagtttattaacttgtttcttaaacatcagagctttttaacagtgtttgcgtgttaccaaagacagaagctcaatgtgtatactatgcaattggcattatccaaacttcaagatgtatactatgcagttggcatcatggcgaatattccttaaaacatctttgtgccaaactgtcttaaatatgggagtcctcactcagaattagttcaggtggctttgctgttagagttaaggtagacgagagcatagttatcctaggactatagtagtatgttaataatactgactggttgagtaagattcttgtaaaatattgagttttttaaggaaatgccagaaataaatatcaattcaatgctataaaagaaatattaccagcgccattggtgtcaacaagcttctcctttggcagtaggatcacagggaatgttttcacctatcagcaacataataggctcagcataaatcatatcatacttgcactatatcccagaatgtttttgaatgctcaaaatgatagatgtttgattctttatttgaagaaaacggcacaagacaaaagggaacatatcctatgcacacaagcttcccgtacacactccgtgcacaccaattaccaaatgtcgtgaaaagttctataaaaaattgaacatttactcctaatagtattacacatatctacaaagcctcattcaaattcattatattttagccgtaacaaaaaagtgaaaaatctgacagttttaagagtaaaaatctgtcataattttgtcttttttgctacggctaaaatataatgaatttgaagataagatttcacatgtaggtgtaatactattggaagtatgtgtcgaatttttactagaattttctgtaatacacggagtgtgcacgggaagcttgtgtgcacaggattatgttccctaagataaatggacatatttgaccaagaaataactgttaaagagacaatttgttttcccaatgtgcatacaaggttttagcatagaaccataagctcaaagccaaatttgttgcaaaacgtaagcatgaattgcattcaccccaaaaaaaataaacgaaaagaagaataatttttccattggagaaagtgaaaccaaaaaaaaatcatatatttttactatgaaactagcagttcaattcaaagatcagtttgcttctgtggataaactgtatgatgaaaatgcaatttgaaagttaatatcagagatgcatacctgtccatcctcagcgacaactactggatcagcaccttgagtaatcacggcaatcctcttttgttttccagaggccaatggaagctgggaaatcttcaacgcgatctcctcaacattctcagtctacaaatttatacaggtaatttgtcagctgcgcaatcaccagaaaagaatgtctaaagaagagagatgaatagttacctcccatccacggactttagcaaagattcttgcttctgtttcgttaccgaagatgtagtccacaaacctacattagtagcaagtgagcttaccttcaacatgaccataaatcaatataatgaatgaacagagataacagaaagccctcaatgacatgacagaactataactggctaaaagattggcacatgccaagcacagggaagtgtcttcacaaaacatgaatggacgttgctttatgtattgtgggtaaagcatgtggttccacataaagttaaaaatataagcattgcagcagagaagatatcacttacggaagaaccttctcctgggcatcacggaaaaactcacagataaagggtgcagagaggttcatcaggaacacctgaaaacaacacggttagtcaaactctaaaaaccacttcaaagggaactctttagtgatagaatttaccttgttgttagcggcagcatgctcagcaacaagctgaatagaatctggggagaccgtaaggaaaaagccagcaatgtagatgtattttgctttctccactgtcgacaacaacgccatattcatcaggacaataaccatttccccatttaaaatgaatgaagtttgatgaactcgatgaaaaagtctaacagtgccgcacaaggtaaggttgtggcaacagtacttctcagaaaaatgcggattctgagtttctgacacacccaaatggttatactaaaattcatgacaacagtcaactgacaagcgcatgcatgtttcaaaatataggaacattacttcttttgtcaagtccacaaacaatctaacagattaccaaaacatgcagaaaacaaagttaacatgagctggtaattaggccgcattgttcttcaaagtcagtaaagcatgttcaggtctcagaggctacaaattaacagaaaagtatgtacagtttgcatacatagtgagcaactcacaagtctcaaacccaagagtttgcacaattaatgcagctgatatgcacagaaatcccccaaattaagtgatgaaatatgtggtggcaaaaagctcagaatatctcaataaattacctagtgcccagttctccggtttcttcagatgctcagatttgtagcagtttgctgctgataagtttgcaaccagtgatctggtacagacagataaatagctaaacatcagatattgttaaagaaaaaggtgctgacgaaatattgagaacggacatagtacgaaatcagcttgaaatcaagatgtatgaagataacaacacttatgacaggcataaactataacaaattactcccttcatctacttttgatagtcatatttcataaggataagtaattctacttatcattcatttaaacatgctactagttattcctcgtaaacaagcgattcattaatatttacatttctcgatgcccaagtagccaatcttgtgtggtagaatgaagagtcacgcattaaatccgagaaagtcattaagaggataggtggttggattgaaatatgcctatcaaaagtattttttttcagatttggaaatatgcctatcaaaagtagatggagggagtactatgataacacttataaacgaacatagcatgtctcataattagttccattatagaccatacaggcaaacactgtgtggcagattgatattccctccattccaaaatataagcatctcttgtggattcaaactttgtacccccaatataagcatttcgaaggcattgattccaatgcacagaaatctatacattttcagccactgagatacttgggaagggagtctaagcaattcaaaatttgatcactaaagtgagtaaaggagaatcatttctctctaccttagattttgctaaagaacatagaaatgcttatattttggaatggagggagttatgtctagtttaaatcaaattaagtattacatgcacaaatttggtaaagcatgactccctagtgcctaatgcaacctacgtaggagtagcatgcaactgtggaatatgaccaaaatatccatgagctatacatagccaacagaagaaataagacacagagaagaatgcagtcagatctactttatttatggaaatattagcactgttgcaagtgctgttccaacattcatttgctacaaaaataatatacaaattatggacaatggtagtgctgcaacataaaaaagattttggcaaaagaggaagtgaaaaaataaaaataagcacaaatgatcgaaattgtggcataatcttccttatgagtaaggataatgtaaatcgtaagtttataagtggcagatacaaataaccagtaaggccgggaggggtaatagagatgacggacctttcaccaccaacaacacagacagcacatgtgcccgtgggagcagcctcatcctcgtagtaatgagcctaaccgagcgtgtgtcaagagcaagaccaccttagttagttgacaagccactgtaggatattattgcatcagatgccatgaaaaagagagagagagagagagagatttagaactaacagtaacaccagcagcttgggcattcttcttcatctcctcaccaaacttatcctttccaatgcaacccatgtaacttgttgcaccaggagtttgaagcatccactgcaaagcaatggcatacagtaagcaaacaagtatatatacaggtttttgttgctcttgctcatggttttagtggattcagagcttacttgagcaaccctgatagagttctgggtggctcctggaagaagagaacaatgaagattagacaatcaaaagattcaccaatatgaaccatattgtaagctcaggttcaagacaaagcgttacctccggcaatatattcaacattgcccttgctggccaactcatcatacctgcaaagtaaaaagagtggattattaagtagcagtttaaagaagaggaaactacaactctaccagtataattaaaaatggaagcggctcaaacacatgcataataatgacaatagaatatttaagggtgatactaatataaatacttacataggcaagtgcttttcctcagcgagaattgcattgttcagcttgacgtcatacctaaaacattggagaagcacgtcaaattgccaaccgtgatgacaccataataagcaacataaataatcatgtactccagcatatcattaaagcagtaaacaagtcaagcgctaacttgagcgtacgcactacttgtcagactccaaatttggagatctatgccaaaaaaacacaagcggagtatattaaacaagcgctaacttcagcgtacacactacttgtcagactccaaatttgaagatctatgccaaaaaaacaagcggagtatattaaacaagcgctaacttcagcgtacacactcgaaaacaagcggagtacatctatgccacgtgaaattggagttctactgatcagtatattatgtaaaatttctcatatatcacgtcgatccgctggtgctggcacttctctcctgatcagtttttttttttacttttggtcccgtgctgcttgcatctgggattaacttactagaccacaaagcatttttgtcgcctcggatctgacgagccgacgcgacaaaagaccaccaaaccattcggatccaaacgaacgcaaaacgaaaaggcaaaaaaaaaaaagggatcagcggtagatcaggactaaggagcaggaggagacgagcgcgcgcgtacttggtgaggaaggcgtcgtcgacgacggcggagatgtcgaggagggggttgcccatccccaggagcacgccctcggacgccattccctctactctccgctcggtggaacgcggcggcggcggcgagcggcgagcgagcgagatctggctagagtttagcgcacgatgggtggaggtgaggaggagggagaagtggcgaggggtgcggcggggggttttagttgggctcgcccaaacctcgcggggcccactcgccagcctccggggccacccccgcggttggtgggcgctgcagtcctcttacccactccgagttggtacccctgcacccgccccgactgtacctacgcccactgacgtgcgggcccgggttggcgatgctgcgcgcgttcagtgcggggattcggtgcacgcgacgctcagctcgctttgatgcgatgcgatagacgggtcgttttcgcccaccaaccaaccatgttgagggaggcggggccggtcgccggtccggtaggtgctcggatgtggcgtcgtgcctaaactgaaccgcaccgaggccgcgtgggacgttaggtgggccgcggggactcataagattgggccttggaatacgtcggcccaaacggcccgtgtaaagggcctaggaatatcgcagctagaagcattctggcccagactgattgatgaatgtcagggatgtgtgtgtgcaggcgtgaaggcctgctctgttcagatttcagaagaactcggcttaaacaaaagggccgtagtgtagtataggagtgtaatactactccctcttattccaaaataagttaactgcccgttccagtggcagagccagccagcaagcagccacacctaggggatcatttgcattaccttgttttgatgttctactcatccatacgaattttagaaattcaaataaaatatgcatggagttaggaacccaagcctagggcttaagccctagctgccttaggtggtccgttcaatagggcttcaactcttaactccaggaactaggtctaaggtttagttgtgaagctatctaaacctattttcatctctctagtttattttgtgagagcactctagtcaattttactccatcttttaatggagctgaaaccgtttggttggactctagctccatgagagatggagttagagcatctccaacagtttctccatcccactttccaggccaaattttagccaaaaaaatgctccaacagcctctccaaccgtatggctaagccatccggctaaccaaacccccctctactagccaaatttggctagccagaaatcattggccaaccgtgggccccacacagattcctcccccatctccttcggctcttctccacgatggcacaggcagccctgacctcgacgccgccgccgacacaggcgacgtgcaacgccgtgagcatcggcttccgtgcactgcctgcatctccacaatggtacggcggagcccctcggccgcgcgcgctgggccactgttgcccgacgaggagggggccatggcggggttcttggggagctgagctcgatgcggcgcagaagtgagggccggcggtggagagcacgacggcgcgtgccacggcgagcgtcttgaacccacgccggagcgccaccatcgtcaatgaggtcgccagccactgtcgccgtcgtttgcaccgtcgctagtcgtcgccatccactaccgtcatccccgaggttgccgttgccgtcgtcgacggggcgccttaacggcgcatgagtccttcctcagcgtcggccatcggtggcatgacgagagcggtagggcagctcgatggcgagggcacgacggcgagggaggaacaaggaaggccggcgaggagcggatcctgtcgttgcctcatgcgtccgtcgtcgtcgtcaggcggcctggcaccggccatcgtcgtgtgaaaacggtgtcgccaccgccggctccccatccacgcgccccctcgccttaagccaccgcctcctcatctgctgggtgggttggagatgggagggagtggcggtggcggcgttgctcgacggcaaggttgagggagacgaggcggccggtgagagctcggccagaggggcaccagcggacggagcccgagcgttggcggctgcagcagaggggagagggaaggggatttggggagaaggggaggaagaagaaagttgtagagactgacatgtgtgccctattgtcatggactcataatagagaggatgaatgggaaggctgttggagtaaaagacagtttgactagctaaattagatgaagagttgaccaaatagacatttggagagtgagatttagagaaactgttggagatgctcttagaactagaactatgccaaacgagtctctaatattagggtgtgacatactctcgtagtactataatctagagacatcacatttcgtaataaattaactcattttgtggcatatgaagtagttatcctataagcctccattctttcctaactcacattccttattttccacgcgcacgcttttcaaactgctgaatagtgtgtttttgcaaatgttttcagtaggagaaatgttttagaaaatcatattaatctatttttttaatattttaaactaatacttaattaatctcgctctaatcgcttgttttgttttatgtgtcaggaggatagcctaaagaatgcatcgagagcataggcagtgtttagttccctacaaacttccaaaaattccattacatcgaatgtttggacatatgcatagagcattaaatatggaaaaaaacaattgcacagtttgcatgtaaattgcgagacaaatcttttgagcctaattacacaatgatttgacaatatgatgctactgtaaacatttgctaatgatgaattaattaggcttaataaattcgtctcgctagtttataggcataatctgtaatatgttttgttattagtctacgtttaatacttcaaaatgtgtgtccatatctttacctattattaaaagtttaagatgtttttgccgaagattttcgtacttcgtgcaattcgattccctccaatactcgaaacggacaactccagagtttgctatatggcttgattccgagatcgatacgatgcgattttgctctaattcttggaaaaacggaaagagaaggagataaggatcaaaacccctcaatcaatttcggattatctccgtggatgcggacatatttcacggtggggcggtggtttctggcggtgtcgcgaagctgtggagttggcagaggtaggagacgacactgtagcattgggatccacgcgacagggagaagaaaagggatgctgattagactttgtggttgcttgatgggccggatgcacgttttcaggccgaggtgaggagaagtgaggttcacgggccggctcggctacgggctaaagaaaaaatgggctcaaaatggcccagggagaaatgagggctttcatttagattttcatttaaataaatgctaaaataatgtttgtattattaaaattagcaatggagctctaaaaataccgaaaaaatttcacatagtgtaattaatcatggaaaatttaataaaaattaaatccatccatagtttatttggaaaattttatttcccacattaaccttgatttttatgagcctttctttccttcaacatcgtatacatgtatagttgcgattttatattttaattaattatataatgtaaatatttctcaaccttttcttaaatttctcatgtttttttctggttgcaacgcatgggtatttttttaattaattataaaaattttaacgcacgaactaacacacggccataaagtacacgaacacgcgatgctacagtagaacatgcctctgctagctccaaacaggtttcatgaaaaagaggcttgtagccgtgtcaggcccgcgctgacagaattacgtgatctgctccaaaagattttcttgggactttgattcacaaaaggacagggacatcctagtggtagtacgaaaggtgggtaacaagacgctatccgtctcgaaacaaaacaactatgtagatgaatctgactaagggggtgttattcatggtaaaattttggcatgtcatattggggtttttttagtgtttatacaccaataaaaaaactaagtgtcatatttggttttttagtgttcaggcactaataaaaaaactaaggcaccaaaaactaattatagaatctatcagtaaatcgcgacacaaatttattaagcataattaatgcgtcattagcaagtttaatgtagcaccatattgtcaaatcatgaagcaattaggcttaaaagatgtcgcaatctgtgcaattagttattgtttagcctatgtttaatacttcatgcatgtatttaaacgttcgatgtgacagggtgtataattttagggtgtgatctaaacaccccataagcatgtttccagagtaatcctcaatgttgtttttttttcggaggaagtactttaatatcattgaggaagtaaatagtagatgagttagtaactatatccatcgatagcactactacctagtggcaacaagccctgaaaaaatattaaactcttctctatctcacccattttttaaaaaacatagtacaaacacaggcatccacaatacgtgtacagtcaccactataaacacacactcatactctacccttatgagcacatccgaaagactggatcgtcatttctctatatgtagactttagtttactatctacacattgtgtaagatagaaataattataacccggttcaatgtatgcttatttaagtgggtaagtacttatttttaattctcacaatagatagataccacatatgtaccaaaaatatagctatttgtagcataataacttgtcaaaaaaaagttatttctctaccacccctcatctcaatcaatcacaatttcatatatatttaatttctcatacaatagtactttcttttctcgaccaattgcaacctaccagctaccaccaatcatttttacctacctttttaataaccgtgctaatatttgcttattgcttctttcagatagcatgttagttttagatgatacttctacccatcttacaacctgccctcacagcgatgaaccaaatattaagaattcttaccgcctattttaggcacattgtggatgcttttaatctcctttaatactacttcatcctcccctgcccgtttgtcccaaaataggcttttttaaataattatcgtattggagtttacgaggatagtagacaatacattgaaattagataaagttcggaacaattgcattggagttcgatactaaaggtattataatctttttatatatattgatacgtgtgtgagtactactacacctagtaataatattaataatgtatacttttgtcttactccttccatcccatattataaatgattttggatgggtgtaagatagcatagtactcatgaatttagacaacaaacgatgtaacatatcctatcactacgaatctagataggctccctgtccagattcatagtatctggatacgccgtatccacctaaaatttcttatataatacggcacaattggcgtattaactatcatagtttgaacaccatattcttggtggcaatataggctgtatttagattaaaagtttggatccaaacttcagtcctttttctgttaggaaacgataggcgaacaaacgataaagaacaatagatcaatcacaaaagacacgagatttaacgtggaaaaccctcccaaaataggagagaaaaaaccacgggcgccagccagcaaaatatcttcactatatctgaggtgaggttacatcgccgcacggcggcttacaataggtatatatatagtggaatcctaaaagggatgatgatccgtaccgcgggggctccgcccccgcacccccgggcgtccccaggcgcacagcccaatgggccagcttcagccttcgctccactacggcagaagctggcctttattaagtgcaaatgggatcacaactcaatattttcatcacatcaacctgtcatacacacacaacttttcagtcacatcatctttaattttaaccaaaatccaaactttgcgctgaactaaatacaaccataatggtacctctaggaccaaatgtgtttgaacatgggacattccgctgactccttctaatggacgatcagatcatcatcaatgtgaggggtgtcgaattgatggacccacacttgacggagatcactgctctctttaaaaatggtatagacagtcaatggtttccgcacactagagacgccgtttgaagccttcattagcaacagaaacctttgtcacgtctcgcattgtgacctggcactttcgctctgccgcttggcagcaagcgcgctgtactgctggccagcgcttcggcgaccccctgctcatgcccacggctccagcctccagcagccaccgctgccacgcgcccacgcccccgcccacgcgacgaaggggcatgagcgtggggcccccacccacccccacccagcagtgacccaggggagagaggggcaatcccgtaacttcgcctcgacatgacccgtcacactataaatccgaccccctttctcggtcccgtctctccacacccacgcccacacacgcaaacacagaacacaccaccccgcgccgcatcgatcgctcccacgaccgacgcgagccgcagcggcggcggaagcggtcgggaccgacgcggacccgtcgatctcctcgcgagcgcgaaccctcgccggagccccttccccgccggcggactcccccgcgttctctctctctctctctcctcgcgccaggggagcggagtgaggcctagctaagctccggttcgtaggtgagtggggggtaacacactcttcgcctttccttcctgtggtggtgcaatttatggattgattttttttttgtgtgtgtgtggatttatcctttccccccgctttactctcacttgctttccgtttgagtagcgaaggagcaagcgcttgagagaggggaagaatcgcgtgcttttctcggcgttgttgcgggggctggggtttggaaggtggtcgggttgggtcgggtttagatgaggttttatgggatcggtctactactcgcgggtcgcggtggtgtgacttgtgcttttagcccatcaagaaagccgttcttttttttttctttttttcgttggcgtgatgaagaaacgttcgcgttctttaaaaacaaaagatcgatcgggagtgaagtttctttgaatgtgcaagattgaagattggttcatgtagtcaatccgaaaatcggtagcctggtgggtgagaatctaactctggtcttacaccagatgaccaggggtagtagggtgccatatcaataattttagctatgcccatatcaataactttagctatgcctgattattaggatcttcaatgctggtaaagttaagtacttatgtgcgtttttcttgacataatacttgtgtgtgtttattactgtatctactcttcattatttcagtaatagattcttttacaattgacaatattgtttggttgttaaccaacgcaaccagggaggtggctcatggttatggttagtacttagtacagtagtagtatctaatggaattagacaatatatttccttattttgtggatacagtagtagtctactactattctctctatgagagaatccattatatgccactgaaaattggtctgatcccttatatgccattgaaaattggctcttcctttatataccattgatcgaaatttgcacactctctcatgccactcccgtcaattgaccgtgtgttgaccgttaattctcaaggaaaaaagacgtatttaccattctgagtatagggcatgcctaacaattcagagagggcaaatatgtcttttttacttgagagttaacggtcaacacacggtcaactgacggtagtgacatgagagggtgcgcaaatttggaccaatggcatataagggaagagccaattttgagtggcatataagggatcataccaattttcagtggcatataagggattatctctctatctaatgacttgcgtcaaaaaaattctatctaatgactggacaacagaaagtacgagcgaatgctggtatgcacgccagacatattgtgtgaactgagagagtatattgagagtttgaggtagctatacagattataatgcttattagcatggttactacgcttatggatgcctatagtagtgtaattgctctggaagttgtcaatattttcttctgatggaaatagaagttgccactcaccatctcccccaatctattatattattaagagaaggataaagggagccaccacattttctctgaaggcatagagattatcacgttaatcagggaaaaggagagatctatgccaatgatttggtaggtccaggttaaccgtgctgattaattgatgtagttatatacaattttacaaatttttttagataatgggcagtgcccggcctctgcatccggaagtggatgcacacggccaagttatatacaaaatagaactgtattcatataaatagaagcaggagttgtgcatcaaacacttctactttcaattaaactttaacctagctctgcgcaaattgcaagattgtgcgggaaattcgtcttttgtttctcttgttaaagatactgttgccattctcagcccttttccttttttggtaatatgtacttatttcacacttcagcgctttagctcatcatgatatttgatgtaaatgtgatttgttcattccatgacttctctaccgagctcaatcctcttggtttcatgctcttcatggtactccctccattaacatttgatcagcatataatttaaaacaaaacattcatatttgatcaacacataagcttggtattccttcggtgaacatgatggcttaattgcttttaaagtttacattgaaatttgatttctttcgcatgcacacttggctccgcataggctgaggtcaatcaattcaatataaaattgcagctgcttggtctctttgatttgcatgcaacgcttttggtttgcatgcaggcatgttgatgcagcagtaaatggacaccttggtcttgctgccaagagctaatacattgatcaaatgtgaaccgaggttgtatcaattaactggatttacatggtagaaataaacacatatttttctacataggacattgtagtggtgtaatgtaaaaatagttttctgcttcagcttgctctgcccttttgccattttagttttcttaaatttcttttggttctagtcccctgttgttatcaggtgattccattaggctctaatgagcttttactaaatagattctaatgatctaggagatgtttggttaagaagttaaaagctacatttttggtgtttaaatagtagatagttcgtttcatgattaacagaaatatgggatattatttgctgtggttaaccattgttgactatcaaacattcaaaccttacaatctgttatccacaccacacagcactagtttggtcctgttagaagggcatgctgtttgttgttgctttgtttctatgggaaattacccttggccacaaattaagaagatgtttggtcctgttagatggcttcagctttgagctctggaagtctggaccttcgagtggtggatgcatagtagtacaaccagttaaaacaactgtagcctaaaagttttctaaattgattgaagaaattattgtggaacatcttcattactgaatacattaagtaccatgcttaaaaatcctgtgccataaagctttagcagagaaaccgaaggtatttctagctccttcaactggcccagtacaggaattcctataacttatgtgtgttttaatttttaaattaatttgtatattcttcgtttcgtgataagagttgtgcttttattaacgtatggttctgaagtttgtcttcctaccctttggtaggttttcttgtggtttgtatctgtgtgtggcacaattaaggtccagcttattggtgcctagatttggaagtgaagcacacaattaattcgactgaagtgaggtcctaactttttccatctttgagccagaagtttcaatgagtcgtcttcatggcaatgacataggatatccagttcagtcaccctactggttttagtagatatattatgggatactgttgatactcgcgaggaatcatctgaatgtaaaaaacttgagatggaaaagggaagtgaggaatatatatcgttttatgactctgaactagaagaaggtgagttcagggagtgtagagcatttgaggatcaaactgttaaagtgaggcagttggcattgcatggaacatgttctggggaatacagtcgaagttattcatcacatgtcaacagtagatcaaataaaaggcacaaacagaaggagcatgactattataaatattccgattatctacaagtcttgaaaaagattgaaaaagtcagctcaagaagatttgataaactattggtatggcacaacgaagaccgtgaggaattcaatgttgtgcgcaaaagtcaagagtttgagttcttccaagaacatctacgctcttatgaagtccagtacacacgagttataccaacaataaaacgttgcaggatgaagctaccaaagttactattctctgttttgcacaagacttttcataaacatttccaatcccagctgatagaatttgtgaaacgacaaataaaagatagagacaaggataagagagtaagaaaccgctggatatttgaggctgaagctggttaccttaagacagattttgacatgattcccttgtcatattctgggcttaagatagagaaattgaaatgctcttcgactgactatttaaatggtgatgcacagctcaactactttaacatggaatgtctatctactgaaattgaagctattgcttcttcaagtacaaaatcagaagagacctgtgcaggcaagagaagcgacacttctgagcccattctagacaattcagaagttctgcttgaaatcaatgtatctaccaaggatggggcttcagttggtgcagctgaagaagttttcacctgtgaaaggtcttcacagtccacctgtgggccgactacaatggtatttggtcaaaataatgggagacaaattgacttcccagtagcagcacaaagtaatgtgggggatgcagagttatcctatgcctctcaatctcacattagtgcagcatcagcacatgctaatgttgtggctgctgattcagaaaatgcaaacctgctttccagagcaaagggaagatgtccaagttcaacctataatgtttcgctaggttcctgctctgggtctcagagaaaactcccatttgagtctgcctcgagcccgtgcgaaactgcattgcttcacaaggttaatctaattctaattttattggctcgttttgacaaataaattttatgatgtggttcggggcctcttacaaactaacctatgacacttcataatctgaaatcctttcacattgcttatctgcaggaagccccatgtgcagatcaccagatatccttgaacactgtttctccgcaggaagctccctgcgcaaatcaccaaatatccttggacactgtttctccgcaggaagctccatctgcaagtccgccttcaactaatgtgattcagatggaacaatctgaggacattagtaatgtgattcgggtggaacagtctgaggacattagaagtgaggaagcgcctaatggtcaagcttcctcctttgcccaagttaccgagcagcctaacatgcaagcaaatacatcaacttgccaggctgttactcatcaaccacctgatgggagtattcattcggttagaactgagtttatcaaccctcgagcatcaaatattgagtcatattcagtcaaccagattctaacaagatccatctttgagcaacgccctaatgaagctgggtttcaatcagatcccgttgctgttgagttgagtcggttacagatgttacgttgtctgatgaccaagagacatgaagagaaggttcctttcttgatcccttcttttttttattcaattgcaaatagcatgtgcacatttcttgcatcttaatagtcttgctcatctaatcagcgtcttctcatgaatttgatcagcggcaacaaattattttggcacgtgaaatagagatggctgaaactaaaaggaagtatgatgagctgatccataaattggagatggaaacatcacagagaaagaaaggaattcaaatacttgctgacaaagtctataaacgacaaacgttggctgagggattccagactatgtttgtttcacacggatcaagaggtacatatgtttaatgcaccgtaagattaattgatataataaatagcttggtataattgctccaaacctggtaacatgtctctatttcaatccgtacgcatctctactgtcatcctttagaatacatataagctggcagtgtcatcttttggcaccggtcagtaaaaatactttcttaaaagaaatttgcacacttttattcaggcgttgtgtttattcaatattcatagaattgtttgccgtagtatcctgattctacaaatatctcacactatctccactaaccagcagcactaacaaactataataataccacgatcttgctgtaaaagtatttttttaacattctgcacttataatttactctatgaagatgtaaagaattcggaaactgcaaataatattaaagtaagattatggtgtgtttctcacagtagaccgaatttccagtttgcacgtctttgcagttctagtgagtaacatttccctttttagacctagtgacttattttggagctggagctataatagtacattttagttatacaagtaaacattccatagactaatgttttgctattacttgatttgttcaatagcatatcaatccaacctgttgcctgtaatctcatttttgatgtgttcatgctatgaatcatgtgcagccaggagaagcatgcagcctaatcgatcatcaggtcagcaggctttgcagattcctgcatccgtttcagccccggcatcagcagtcatgtgtcaaccatcgcaacaggatgcgcagtcatccatgggcagttcaccgcgacacccttttgtgacaataaatcaccatagcatggactatttgggcagatctgctactcccttggctcacagtcgaggtgctggcatgggctctgggattgcgtaccatgcaccagaatcccatctccattctgttgtaaatccattgccagcatcaggtctccaacttgggatcgcgagcttggaacaatagctggggcttttgattcttcttcgaagctttcgggcatgcagcccgtaaggttacatacagtgtaaccgtatgtgtttctatgatgactttaacttctgagttttgcttagtgagaaatagatcctacttagaatccgatcaggccgtatacttctctagctgggagattaatctgttagtttatgtttcgctttctgcatccttcaagttcagtagcaacagtttgactgagactggagctgtcacaggtggcagacatgtggtacacccaaaatcctgaaaccagcctgcatctgaagtgcttggccgtccttttctcgtctttggtcctgagcctgcgttatttctccctacgttggtcctgcacagaatgcatttacagtcatggatcccatgtcaatttctcatggaccatgcgcagatattcatgaggcccaggctcattggagtactactctcgtagtctcatcagaatggtcctgctcagtgtcatggggaaggataaccgaagtgatggttgaatgtcttcactcgtgcaaatacctatgaggccaagcatcggtggtgtctggtcatctggtgtggtactgtggtgtgaattgtctgcactgcatctcaattctgaattgtgatactgtagtcgcgtacccattgggatggtcatagttgtactcatcatggtaatatgggaggattggtggtacaatggtgaaatcgtaagtactccgtcctaaaaaaaatcaacctaatattaggatgtgacacattctaatacaacgaatctagacatacattctcacgtcgtagtacgaggttgagttttttttttgggacgaagggagaagtgtcttacccattcccataagggtttagggcctatttggttactacctgagagcaaatttaatagtatagctaaccgacggctccaaatcatttatagtcaacttaataactaatccatacaatagttacctataaatatatactacacaattaatatctggtcccatctgtcatacgcacatgcttcttagagtccgtgctgcagctggctataaatatatagctcgctgctcttctctcttctcgtttatctcctcgaaataagtttatagctggcttatagtttgctattgtacttgctctgagagaaagttgcctggctagagacatgcccgagactattttgtgagtgtttggttgctacccacgagagaggggttgggaacaaggggttgcaatcacagcctgagtctccttccacctctcttgccctgatgcagctcaggcgtgggattagcctgggctccaggcgcggcaacgcttcgcattagcaccataatccccttgtcactaggctgcccgaggctgtcgcgcgccgtggtcaccgccgtgaaaactgcgcaagaagctgccgagtccaccgccgctgccgtcgcgcgagaccgccgaagccacacgaagctcatgtcgtcgcttgccggagtgccgtacccatcatcgagcggagccaccgtcagatcatgtcgtctctgccgcttcgcttggatttggtctcctcgtgaagcagcgatgcttcgcaagcagattgttgtctctactagatgcatggatttcctcctgttattttcttttcccttcttgatgatttcctcgctggatcccgccgtccacacgaagcagcgccgccgctgtgtggagacgccatcgccgctaggcaaggatttatcccatggtacagtaagcagatcgattgcatgcaatcttggtgaactatcggcaataaatcatccaaatttatgccgatatacatagatttagaatctttcggctcattctatgtctttttttttctatttcacttgttttttagattatttgttccttccttaggtatatgattgatttgtgtaaggaggcggacgcgctcgatgaatttggttgtaggctggatataattgcctgccaaaaattatgtcggatgttaatacttgacttagcattataatgatcaaacatctaacataatttttttctcgggcacgagccacaaggcccacaaccaaacaagatgaggctgaggctgtctgaccaggcagcatacattacaactttgaataccactcaggcttacaaatttctcgggcacgaaggtgagggcaccaatcaaacaggtccttaaaccccaatggtcatggatactgcatacgtaagtatataccttttccccgtaagggttcaaaccccaatggtcatgaataccgcataaatccatggccattcctgttgcaaactcttctatcacgtcgctctccccaggggtggcttgggaggcgacgattcggccgcccctctcccccacctcccttctcctcctcaccgtcgctcgagcggccgccggcaaagccgcgtggccgcaaggatggcggcgtcggggctctcctcgtcttctcgcgctcgggcggtctagggagccgcccggagcggcgatggcggtgactgccaaacctgcgccgttccggccagatctggcggggtggctggctacggggaaggcggtggggacgggtgatggtggcggtcgaggtgagttgcaccgggtggagttgtggttatggcggcggggatggcgacgacgatagggcggcggtggtggaggcgcggatccggcggcggcgcgacggccggtggtgggcagcacacgcaggcatcccgcgactgccactggcgttctccgacgcttcttggcgtcggccaacgttggtggtaaggagggcagccggatctggcttcttgcccaaatccggcgcatcctcgtgtggggatggggtggattagtgttcggtcatctgtgcaggtggtgtgaatattgcaggtaccctcgatgtgcatatgacatttggtggctcctgccatggatgctatggttgatgggggctctaaggcgaaagccttgctctgctctcggtgctagcaacggcgacgcccttgggcgccgttcaccttcttgaagacgttgctactggagctctcatttaactccacttcaagagatttctccgggtgaaaacctagattcgttaggatcggatgaagtcgccgttctgtcagcgtaaccttcttgaaggcttcgttttaggagtttttctcttgttggacgtctgtacttaggttcagtttgtcaaagtcggggttttcaccagttttcctttaattaaccgtgctgttgtaaggtttttgggtctggttttccttataaactggatcaactatcttcttctatagtgaaatgcaggagctccccgcctgttccctcgaaaaaaaacgaataccgcataaattagattgtactccgcacgttcttgcggatagctgtatacatctgaaaaaaaagattttacgtcaattctctatataccaaaaccagtaaatagtaccgagttgccaactaaagaagctttcaagagaaacaacaaatccatagaaacaggcaaacaagtgtcgaacacactaaaagttgccaaaaaaaatcatcatatgaaaataatggaagcgcgtatatactacctccgtcccaaaattttaaatctttgtttgtaatgtttgattattcgttttattcataaaattatggaattattatttattttgtttgtgacttgctttattatcaaaagtattacaagtatgacttatcttttttatatttacactaatttttctaataaaaatgaatggtcaaatgttacaagtaaaaagtcaaagcgacatttattataagacaggggtagtagttatcaatgtcacgcatcccaatcccttaaaaaaatatatattaagagcctgcgaaactcatttataggctaaaatgagccgtggacccacttattttgagccataagcatcccttagctccaaggctccaattactaaatttaatctcaagagctagtctagagtgaaattgtggagcagccaaaaccagctccatctccctagtttattttatgagagtactctagccagctgcactcctattaattttagatgtaactaaaaactctttagctagtctccagcttcagaagaggtggagttgaagctgaaactctaccaaacagtttccacgacaaatttaagctactccattaaacataaaattaattaaagactaatgcacatgagtaaactggggtgggctgaaattgctctggttgatagatggaattttgaggatgaaatggttggctcatgcagctgccttgcaattatcattcaatcgatgaaacttgaatacttccattgcacagaaaataatgtttcttcaaagcatgtgagagcaagagctaatacgatgatgggttttatttgctgaatggaatagcaaagtagtcgggacaaaaaggctgcttcacttcattgtaaaaaaaaaaattcttagaatacctattttcggtaacgctaaattttggtagtgtttaatttttataagactagaaaaaaataccattacgttgcaacgggtgaagactattttaatcttattattattatacgaaattcattgtgataatttgcttggatatatatatatattttaaaaaatataagctgcaattaggagtccgatcatctcaagttagtatgcgagttctttaaatagatttcttatatgactcctgtatttctaaaagcgaacgaacttaaaacctgactcaaaatacggatatgtatttttaaaagcaaacgaacttaaaaaccgactaatgacataccaaaatactgacaaaaatatcttcaatttttatattttaataagataaggtgaaggtggatggtgtttatagtttgataacttatcaaattttggttactaaaatttagatttagaatggtttgagaatggcaagtaagttaacaagcccaaagatacgattcaggaatgagaaattaagatctcctgcagggcgtaaaactgaaaaacaaaaacaatggataaagaaggccagccggggatgctgtcatttgccggcttaagcccactagatgcctgaggtgatgaggtcaaagccggactaggcatctccttcttgggtcgaaaactaagctgggccaagacgaggggccgaatgccccaagcaggccgaccaagtatggtgctccaccatgagattaaagtaaggtcaaacgttatgaagtttttgaatttctatcataagtgttatggaatattatctcctggagagataagatcctttcctatggaccaatccaaatcggagtagatataagatctatcttcttgtaagaccttatatatataggggcacgatgagacatatgaggttggcttgcactacagaccagatctataatgacgagagagctccaccctacatatgtgtccattgtctacttctacaatgttcttaaaagcaaagggaaggacacgagtattctacatcatctcacgcctctactgttgtgggaggaacaaagaacggattcagtgatccactaataggcgcgttggtttacaacacgaagaaatagcctcgtttgattcccaggatagaataatcggtatagaaactctatacacataaatatttgacacataaactttatgcatataaaaatttgaaactttataagtagaaacatttgcaaattttatatgtaacagtatttcatatataaactttatacataaaatattcaaattaaataaaaaacacaagcacttgattgggccgtattcagcccaaaaggtaacgggctgagcccatgagaaaaccaccaagcaggcctccatgagcaatgttgccaaaaaaacatggttagccaacaaaaagtcactcaaaaaagcaaacgccgacacgatcgttggcgaccacccgcgcgatagcattttcgaataataagagccatttgacactagcataggaaaaatcaaaggaaagtttataaaaaggtcacactcttgataattttcctatgaaatatgaagcataggaatacagtccatcttttcctataaattaaagggatatgcaggaaaaaaatcaatagaaattttaatcctataaaactcttgtgccaatcctataaatcaaagggaagctcgttggtttcagcggacagatatatttggctcattcaaccaaaatctcgtttcctctcccaatcaaaaagaaaaaaaagaaagaagggagattttactacatacacatagatacaccaaaatacctctaaaacatgtaagactattaagaaggtactatgtctgttttttaatatatgatactgttaattttttttataaaagtttaatcattcatcttattttttaaatataaaaaataagtcatgctgaaacaatatttaataataaataaaaataaaaataaaatactactatatgataattgtataaatttaataaatgtatcttaaaaaagtcaacgtcgtcatatattaaaaaacgatgggagtaacaaaggatattttgattgtaggggtactttggtaaattttatatatagtaaaccgtgaaatgccaagtatatatgggagaaaatttgacaagtagtgccacgcaaaagcaagatgttgaactaattactcgcaacgtctgccaccatcgtttgcatggtaaaaaacgaatcgtagattcccacagcatcggctaattgcttacccggaccctttcagcgatcccacattttctccgattgcgacatcacaatcgtacatgcaaatatacaatcaccgttgagccggcaggtgagaattggtcggacagcacgtactatttccagccttccagttccaggctgacaaagtcggcacatttgtaacgtactccctctaatatctcagatatagcgatgtgtaacgttttaattcaacaaaaaacatagtactcctgtacatactctttcatctcggacatatctatccctcgtgttgctgcggaatgactatgccccgataaatgaattttcgaaaaatatgcaagctaaggaataaagaataaaataaggacttaaactaactggagagatcaatggtcttttcgtaaagagttagaactaaatgaatgtactataattgtaatgatgaaatgcacatggatataatacaattaaatgccttttaactctttagttttatacggctaagatcctagccctctaatggatgataaaatttttcattttaaatagaaacaacttttttatgtctgaacaaacgaaacatggttcgggaccaacagttctaaagttcatatgagacaaaagaaacagttgagtggagttggattttgtgctcaaattgttgaattagaaaaatgggagcagttgcttagagtgagtgattatttgatgggtcctttgagcactaagagagcgctattacttaatcatgtactattgtgcaatcaacataaggaataaaggggattaatttcagtttttattaagacaacagttacaacaacatcagaaataaaggggattaatttcagttttattgagacaacaattaatgcaacgagctagcgaagtattctattgaatcgatggctgatatttaagatacacaacgatccaatggttgtgatatttgtgatgatgtggcttcacatacttctagctaacggtgacacctgtatagatattactaccgtctcttatctaattgctcatttagtttacgtttatttgtaatttgtaatctccgtaaaaagctaaaaaatacttatattttgtgatgaccgatgagtattctctgcacgcaggccacctcctgcatttgtttttttgtttttccagatccccggaatcatttcccggcagagagcaatcaacagaggtccctaattctgttgatccgtctgctctcatcaccatcaatttcccccttttgctagggcgttgagatcagagagcgacgtgcagactactcgatcgattgcaatggtacgaccgtgtctgatcgatcaggggtatatataccttctcttcttctttagccgaatttgttatcaggttgtatcactgcatctgcatgcatgtgtttggaggccctcttcagacgcaagctagacaacttgtaaagtggtcacttgatctccacacaccaaccaaccattctctctagctagcttgtacgtattgcattttgttcagtcaatcattgatcggattgttagtgatatgccctaaaggcaatcataaagataattgtatcacatactatgtttacatatttatccgacattgttccttaaaatagataactccttattggttaatgaatatgtcattctttcatgagactctttatgttgtttgttactatttctaaagaatccctaatcaaatatcatatgtggaacaaatatatttatatgatcagcacatgtattaattgatgatcatgtctcatggatcatggtatagagataccaaattaataatgtggacacatgttggtgaacatgttgttggatagacccaacatgagacgctgcaagagccatatgtgttgtgtcatcagtgatctcattgagtgttggtgttgaatccttagacctgagattatcatggttctcaacatgtgtagtagcttacttagggactgctaaacgctactccgtaattgggtagttataaaagtagttttcgggtatgctatgaaacatgtagtgggatatgaataatcaagatgggatttgcccctcctatggagagatatctctgggcccctcgatgttgtagattatggaagtacatggccatgccaaaggtgattgaggagtcaatcacaagttatataatctatcaacaggttcgagtgaatgattgagctattagaggatggcacatatctagctttgagcttaatcgatatcgtgaggcaaaggggttcatacaagtatacactagaggttcagctgatatgatctttatgtatgcccggtgggtcaatacgttctgctaggggccgctgttgacacgtggaccgaaaaggagttttcgggttacagccgagtatatacgaacctacagggtcgcacgcttaatgggccggaataaggggattggatagagatccaatataagcttaattcggatagggatccgaatagaagtcctacgggccttggaggcccgagtgatggatcctatatattcgtgaggggtgtgaccggcggaggcattgcatcacatgagaaaccctagccgtcacttttctccccgagcaaaaccctagccgcgcgcgggtgttagcacatctgcgcgtggcgttccgtccctatacgtgtggataccagtagaggcgccgctggtttgcggtgctgatcggcgtgggagtacggcgaggagaacgcacgaggaggagaaggtcgagccggtgcgatcgactacttcctctacatcgacgcgcgctacttcgcgagagttccttcgacttctcagcgtcttcttccgctgcgcagcgcgtcgagtggtaacgatctatgatctaatacttgcatggttcctagtttacgcgatagaaaattttgatttatgctatcgtagcctacgcgtatcccaacacggatactttacctggcatgttgagagagagaactcaacaaagtccagatgagatcatgaggaccagttggtagttagtttaattaggtgttaaaagagcttttcaaagggaggttagattaagtgtttctggtcaaattgtctcactcactcaaaactctgatttaaaaagctaaattgagctggaattggtgcaaggaaagtatatggtgctcaatacttcctgtggaatttaatctgtcaaccttatcttattttgaagctttggtgagaagaggcatggttggactgaacaatgtgttggctactactacttaccttaagctgatggtggtggagtagtggttggaaccaactttcaattctagctaagcaataacaatctaaacctttaggtcaaccagagctcactttctttcacaaaaaagaaaaaaaaacacagagctccctgtctcactctcacctaactcaccagaggtagagaggtgcacttcatctaatcctaaccggtcctttccctgaagtgggctcatggcatagaccaaggtaagattagtagttgttgtttggtagatgaaaggaacacattccttactggtttttgcttagccatctgaggaagcaagccaagcagtgtcaacaaccttgtgatccaaagatgggagcttttcctttgctttcttcagatttatttctctgccttttctcataaacataaccgaattcaagaatgcacttttctgtcctctctgctgctgcgaaaacgttcttggtttggggatttaaatccagccttgctgagagatcaaggaaaggaatatgatgcatgttgctaacgagatggtcggttagttgcatatgacaactacctaggggcacatggtgtacctaactaagacatgtccagcatgatacctatcaactactagctacaaccatgttgtacacatctcttctctcgacgccatttttcgttagaaagactctgtaccacccaatggatgctcataaattctcataaccaatattttcttgcgctatctcagttgtcaaaatgctggtacttcactgtgaaccttccttggatcgatgtgtatatgttctttatcaatgaactaagtcatattttctgcctttgtttttttgtttttttttttaaaatgctggtactgaactaattacgcttgataggctgatgcccctgtactcactagtcactaccgaccgaagacttcacattacaagctaagggttcgattggatctttcatcttctctgaggaaaaatcatttccgtggacaaaaggacatgaatgcagtagtagtggcataccacttataagttataaccacatattattggtcacaagatgcaatagtctattgctcatttatttgtcaggtacataaacaaacagtttgtgtacatgttctagcgacttaaacgggaccgtacaacgaatcttcagtcatttttacattcgtcatttctctgtgatcaaagaaaaacaaacaaacatttttcataataattaggcgtgtatgtttggtcataggaatcctatggatggaaaccacatggttctcctcagtttttctcttgtttttttttcagttggaatgatagaaacagggggcctctagacaaatgcttcttcttacatcaaaccatgagctgtcgttttgagtgtgtgtgtgtgtggctgcctctactctatgcaccttccatccattaggagctctcactcatgaagtggcagaggataagaataatcacctagcaccaagtcggccactgacctagactttgacaggctaatcacttgcctgcttcacatacacaagttcagactattttttgcaagttgaagccttcaattgtgttttgtcatatgatggttgtgattaatcatgtttactagagcttggctggaactgtctgcctcaagacttggcccaggctacagcgaataggtcaagcactcaagcagtattagtctgttaattggcagcttcttccagtcagctcactgactcgctcttctgattgtttgcaagcaatcgcggtggttggcaggcacatagtttagcatttctgctgttcttgtgggggcatgtgtatcctaaaattgttttaaaatttggaagaatggtcttattagcacaaggttgaatttaacacaatcttatcaatcatatccaaaaacatgactattcctatgcttatccaattgattttaggacaaagtaaacaaccaaaattcaagctgaaggaattgcaagtgcaaggttggtgacgtggcgcacgcctacaagtactcactctaccaatctaatggaagttttcttaaccatgatacagtcgccactcgccagtctagcacgagcagtatggccatgaaaattattcaagaaattaaaccataatatttttaagtgctgttttccccatgtcaccatttttttttggtcagttggcacattttcgttttgtttttggtgtggggtagccaccgtggtaggtaagctgcaaagctttcgagctcttgttaggtagccataccgatcaacctgctcctaatttttccctgtagttttctgattattaaatccgcctgtttgatccagagcagcaaataactaacagatcggaacaacaacagagcatcatttgcagtgacactgaagtactagaacagatcagcacaatcagcagaaatgtcgtactgtagcaagtggcaagtagccttctcactgcacctaacgacttcgatccgaccttggcctgtcggtttctgctcaaggaagctacctgcaagctcgatccagttcatcagcagttacagatcgaacactaggtcatcacttacacatcaatggaattaaaaatgctggtcaggaacgagtagttgatcagtgtgactgagctctactccttccatccttaaaaaaaaaactttttatacacaaatatagatgtaagttatatttagattcataggtaaaagttgttttttttaagcagtactgagagatagtagttgcaagtaacatgtacctgaaatgaacttagttttcaggtctagagaaaaaatggccacttctattaatttgctcctcctgttggcattaatttatggcaccttcatttcagtgaccacactagcacaccaacacatagcaatgatttttttttttgaaaagagaacacatagcaatgatgaacagaaaaggggagcaaatcatgcctagtcaagtagctacctttgattatagcccaagagcgaaacttaagagcgatttggacatcgctcatgaggtcatgcgcctttgtcaagtttttgtcccaaacggtaggtggatggcaatctcatggcgattggtgacgcaaacccccattgatttgtgctcgcccactgcttaaagcctctttagttcgtgaaaagaaattttttaaatgtcatatcagacgtttgaccggatatcgaaagagattttcggatatgaatgaaaaaactaatttcataactcgcctgtaaaccgcgagacgaatcttttgagcctaattaatccgtcattaataaatataggttactgtagcatttatggctaatcatggactaattaggctcaaaagattcgtctcgcgattaccccctagctgtgcaattaatttttaatttatctatatttaatactccatacatgtgtctaaatattcgatgtgatgtttttgggaaaaagttttaggcaactaaacagggccttactagcaatgatcaacaaacactacgagtccatgacaactcaattttgcaagtcccaaagaaagcgatgcattgagctgaagacgaattcgaatcacagttaagctgaagacattgtattataggatcaaaacatttctattaccacaactttttaaggatggaatcgagtagcaatactttcaccccaaaatacagtttagcgacaatatcttagaaaagccgcttgctttgccgccatggctggcaagctgagcagagcagctaacacaaagaacacgagatcactataaaccaaacggcaacgaacgaagaaaatacagggtcttttttgtctgaagatacacgaagcggttcgttttcttttatttttagtctcctctcctcctcgatgatgggtgtatggcaatggcaatggcgatgggatcttggcttagttgatgggaaggggctcgccgttccactccttgaggcagtcgagcatggggtcgatgagcttgccctggctgatgccgaggaacaccttgttgcactcctcgccgggggacttgagcttctcgccggtgaggaatacgcagccgagctcctcgcggacgaagcggtagagcgggaacgaccggctctcgacgatccggttggcgacgggggcggtgccgttggcgacggcgacgcgggcggcctcgatctcccggggcagcgcagagcggagctcctcctcgaacttggtgatcttggagaacacggaggcctcgggctcggcgtcgccgctggtgagggcgtgctcgacgagcacggcgcggagcttctgcatgagcgggtagttggcgctgcacgggtcgtcggcatagctgaacacggcctcgcggtcgatggcggtgaggaggttcttctcgctgaagcgcgcgctggagaggtcgccggtggggttcatggtgagcaccttcttggccacctgggtgacgcagttcttgacggagctcttgatgttctcctcgaggtggcgaaggtcgacggcctggcacagggcgacgatgtaggtggaggtcatgagcttgaggatgtccaccgcctccagggtcttcctggccgagacgagacccagcgagttcacgtcctggttgtgctgctccgcgctctggacatggttggtgatggggttggcgaggtactggagctcagagcagtaggaggccatggcgatctcggtgcccttgaacccgtagtccaagctcgggttgcggctgccggccaggttggaggtcagcccgttgttgtagaactcgttcacgagctcggagaactgcgcgaacatgagcttgccgatgttggcgatggcgagacgggcgttgtccatggacacaccgatgggggtgccctggaagttgccgccgtggagcgccttgccgcggtggacgtcgatcaccgggttgtcgttcacggagttgacctcgcgctcgatggacttggtggcggcgcggatgacctcgatctgcgggccgagccactgcggcgacgtgcggagcgcgtacctgtcctgcttcggcttcagcagcgggtccatctcgttcaccttcttggcgtggctcatgaacgagctcccggcgaggatgtgctccatgatggcggcggcctcgatcgacccagggtggtgcttcagcttgtgggtcaggtggtcggtgtactccggcttgccgttcatcacctcgcagaacaccgccgagagcacctcggacaggacggcgaggatgttggcgtcgaacatcacggtggccgcgagcgccgaccccacggacgtgccattgacgatggcgagaccttccttggggttcagcgtgaagaagccaccctcgatgccggcgagcttgaacgcctcggcggcgtccaccttcctgccgtcgggcgagatggcctgcgcgttggggcggccggtgatgaggccggcaatgtaggacaggggaaccaggtcaccggacgcggtgatggtgccacggagcggcaggcacggcgtgacgccggtgttgagcagcttggtgatggcctcgaggatctcgaaccggatgccggagtagccctggaggagggtgttgatgcgcacgagcatggccgcccgcaccgtctccgacggcagcgtgtggccatcggagccagtgccgaagattccggcgttgagatgcctgcagcagcagaagcacgcacatggtcagagacgacagatcgacagctagatgcagtggatgcatggatggctactactgtacagaaaaccgttaaattaactgccaagttgcagcccaaacaagtaaaccagacgacaaattggaacaactggttgtaaactcttgtcctctgttacaactcgcatcgggatttggaaacaagaacaccctatggccctgacaattgtacgactactcaacatgttttttccttgagtcacttgtgctcccggctaactggcacgcgtggggcgtgacacgactagatctgcacaagaaccagtcctacaaaaatatcccagtatacattttccatcgaaattccattttcagcagagaaagaaagaaaaaatctatacgcgcatttatccataaaactattaaatacagatatagtatatatcttctgacttctccaccatgatactcgtacgtgccgacttgtcagtttgtcacccatcctatggcacatatactactcctatatcctaccactggattttttttccgccaacaaaattttatactacttttattcatttttctaaagaacatatgtatatttcttttcaaagcatataggagtaaagtatgtaccaacaaaataaagtggtttcctgagagcgtgtcaccgggcgggcacaggaggagcgtgacctgtttttccgccgcgcacgccggtggcgtgcgcatactctcggtagtacgacgagaccaccgcgcggtgcggggaaaacgacgccccaccagacgcctcgctcgcgcgaactcgctgtgtcgcgcgcgccggtgagatagatctggccgtttttttctttttttttttcaactggagctgtgctggtggtgtatatactacacatgagacaagttttccagcttggtactagaattaaacagcttggatgctgtacttgactttatgctatgagcaaaaaattccatgctggtaagggagtgcatttatttgcttctgtttttttcttttgctaataaagagtaggaacagcccatgaatctcaggggatggccaagaaaaagggcacatcgctttttgccttttttaacttgcattttatatctttgatgctactgctactcatcagtcatgactcatgaggtgagctgggatcatgagctgtgtgtctatctatgggcgaagttgtacttctacaataagaaattcataaaaactcccggtaaacgcggggggacgaagtggttgaaagtggatctatgctatccatagcaattaaggcagtaatgaagtaattaattggatgattgttttttacctgaggagctcgacttggagggcggggccgtccttggtgcggcggtgggaggtgccgccgaagccggtggtgacgccgtagatgtcgccgccgtgggcgatgcagttgaggatccactcgctgctggccttgacgcgggggcgggcctcctcgtcgagctcgacggcgacgccggcggcgtccttggcctgggcgacggcggccacctggccgacgcggagggtggcgccctggatcttgaccagcggctcgcggaactgcgccaccatgcgcttcacctcgtcgaggtggctgccggccatctcggccgccgccgcgccccagttgagcgggtcctccttgttgatcggcccgttgcccgccattgctacggtggtggtggtgggcacgaggagaagagaggattcgatactgaagaagagccggaggagaaggtagtgagctcttcttggagggaaatggaggcggagggggcgcttaaatagtggcgcggtggacggggtgggcgggtgtaggtaggtaaggccttttcctctcttctccctctgcctagtgggttggttggtggcttgtatggtggatctataaaaaaaaaagatatataacttccatcctactttacttttttgttccatggagaatggttttttcatgtgcacttgaacatcactacattatcatatttggccaaaattaatgaagggccatatttgaaacacataatttctcttagtttctatatgggtcgaactatttcttgcgataatattgcccgtggtccaaacacggaacgatgattatgactttcaaaattgaaaccgccgtcgtgttcacgagtaatctaaccaacctgatgaaaaatttgggactttttgaatgaaagtgcctcttttttagaaaaaagaatttgtggtgtgcatttgccgatgcttttgctcacttttaagaatgtttgttttccaatggttttccctttgttctaaaacttttctgttgttggtgatcacgcagtagccagtaggaaagtgaaggagggacaaatctcaccaaccctgaaaaggaaaaccaggctgctctcgagtggaaaccggagttgttggctggacaattattgcgtgtgcatctctgccgaacaaaaaaaaagaagaagagaaaatcatttgctcttcgcactcagcagcacgctctgcgattattcacgtcagtgcaaggtcactacaccttagagatagatagatatgtctctcttaataaaaaaaacaaaacaaggattgatagatcgatatatatctagaagatatacctcaacacttcaacagacattttagactcatttgcttggatattgttttccacatttgctgactgtgtgagccagcacacggctggactgtcaaaatggcaaccagaatctcccccttgtgcaaggatcacaaaagaacagagctccaaatcatgttaaaagagattataaccagcactctagcaggtattgcatttatgtgtactaattaaggaaaaccttatgtaaaaatccaaatcatagattcttatcggttttaagtttgtctatctcgttaatattattttgatgagatacggacaaataataattttaaggggacaatgatatatagatagatgttataaaaaaatggagttgacatatgtgcgttttaggaattggtagactacttgtttaggttggttcggggtcgtgatacaaagaaaacaaaaatttatttttctgtagttacaaaacaaacgaatgtggagataaacccaaatcatagattcttgtcagttttaagtttctctataccggtaatattcttttgttgatataccaacaaataaaaaccttgagggggtcaagcggtacataattgttataaaagcgtagtgacatatgtgtggatgtgttttaggtattggtagacgacttgtttggctcggtttggagttgcaactcaaagaaaacaaaattttatttttatagttacaaaacaaatgaacatggagataaatccaaatcatagattcttgtcggtttcaagtttgtatatcccgcaatattcttttgatgagataccgacaaataacaactttagtgggggcgggggggtaacggtcgataactaatataaagatgtagcgacatacgtgcacatgcgctttaggtattggtagacgtgcgtatgcgttctacgtattggtagatgacttgtttggcttatttcggaatcacaattcaaggaaaacaacatttttaggtttttttaggtacaaaacaaacgaatgtggagataaatccaaatcatagattcttgccggttttaagtttgtctatcccggtaatattcctttgatgagataccgacaaataacaactttaagggggtagcgatagataactgttataaagacatagcgacatacatgcacatgcgctctaggtattggtagatgacttgtttggctcggtttggagtcacaactcaaagaaaacacaaatgtagtttaattataaaacaaaaggatatggatataaatctaaagtgtaaattcttgtcagtttgaagctcatcattcctggtaaatattctttgatgagatatccacaaataacaactttaaaaggtaacgatagacaactattatagaaggtagtaacatatgtgcgaatgcgttctagattattggtacacgatttgtttggctcagtccagagtcgcgacttaaagaaaacaacattttacttttagttacaaaacaagcggatgtggatatacatccaaaccacatattcttgtcggttttaagtattttatcccggtaatataagataacaaatgtgtttgtggaatcagggttaataacaaaaggcaggggtcaaaaaattatataccttgtttcagagtaaccttctgagccaacttcttggacatatattttttccttttcgcatattaacatggaaatatctatggagttttgttatagatagactacaaaagtaaggatatctgcgatatataatgcattgatgacagctaaccaagatagacatgggcatgccttatactccctccgtactcataaaggaagtcgtttaggataatgtttaagtcaaacattgggaatataaatcataaataactctcaagttgttgagtttgaaactataaaaattatatgaatatatttgtcttgaaaaatactttcataaaagtatacatatattacttttcaataaatatttttatagaaacaagaagttaaagttgtgttttgaaaaccgtgtcgctatccaaaatgactttctttacgagtacgtagggagtaccctcgttagcttcaaattttaaaagatatataagaggcacctaggtcaaatacatttatttggagacaaagtgatatgcaaccgcagcccttcatatctagcactaccagtatcattaatcaacagtgggaaaaaaaacaaaaattgaatgcagtgctaatagtagtgctaggggggacaacatagaattggtcatggttgcgatggtgcagtagataacaagacgatcaaatttgattataattttatcatggtctttcctgcttcttgttttctttaatataagtcagttataaattaaaatgacatatggtgtttttttttccagaaaagtagtactaggtggaacaaaaatcaaaagatgaaatatcttccatgcctattcctattaatgaagtttagtgagatgcatgcctccaattaattgttggtgtgacaggttgaaagtgattctcttctcccacaggattccccttttaattaaacctggttcagagaagttcatcgtgattatattgatatggaaaaagtacgccgaagacctctcaacttgtcatcggggtttcccagactgccggggccggggttaccgcgccccggcagtaagcacggttaccgcgcggtaaccgcaccgcggtaaccgtgaaaaaccgtacaaaaccgtgcaaaatttatcaaaaattcaaattattttttaaatttatttgaatttaaggaggttaccgcggtatttatattaccgtacccccgcggtaagcccggtaaccgcgcggttaccagcggtaagtcgaaccctgcttgtcatcgagttacaaaattgttccctaaccgcaaaaccagatatatgacacccctcaactcacaaaaccgtacactttaagtccttcggttgttttgaccccagttttatccgatgtggctgctgagtcagcatgggaccacatggaccccacatgtcagtgtatccacgtcagcaccctctctcttgcccctcttctctctcttcctcctctctcacattcttctcgtttggataggccagtcgacaggtggagaggaggttggcagtgtgaggcaggagagaaggagggcatcggcggccggcgacaggcgacgtggcggtggcagcaacaacaagggagaaggggaggcggtggttgcagaggccgcaggcgtggaggagggcgttggtggtcgacgacgggcgaagcaggagaaggggaggcagcggcgcacgaattcacgccgcggttgcatctcctccgccgccgcaccacactgcggcagggtcgagcgagccatggaacattggcatcaaggtggagcagctaggtacggccggcagccagtgggggagcagctgggcgcgggcgacgggcgtaggcggcggggggaggagctgcgcatgggcggtggctggcggggaagcagctggccaccccacttccatctctggcacgagccgcttgaatgcctccgtgtggtgctcgtcgttgtcaccggcgaggcgacgcatatccatgacactggctgagtcgtcgtactcggcctcgatgaacatgacacctagggagatggccgcaacagagtagtcgatgacgacattgtcgtgggaggggcgtttgagcttcttccccgacgcctgcctcccgcacgcagctcctcccccgccgcccacgcgtagctcctccccccgtcgcccatgaattcatgctcatgggcccgcttctcctccgccgccgcctcgtgggcctcgtcccctccctcctcgcggcgcacccgttcgtctcgcacgacgtcagcgtcgctgccattaccgccgccacgtcactgccattaccgctgccgcgtcgcccgtcgccgggcaccgacgccctcctcctctcccgcctcatcccgctagccagcctcgcagagaagtgagagagagagaggaggaagggagagaagaggggaaagagaggaggtgttgacgtggacacgctgacatgtggggcccacgctgactcaaccaccacgtcgaacaacgatcaaaaccgctgaaggacctaaagtgaatggttttgtaagttgggggatgttatatatctggttttgcggttgagggacgattttgtaactcgatgacaaattgagggaccttcggtgtactttttcctattgatattccggaccaacaaaaaagatctggcccgatccattgcctcatcccaatcggcccaagcttcgtcggcctagggttacctacatcagaaataagaaaatggaagcattttagagggtggatcatgcgactaacaagtaacaaccatgccgaattgctgtactggctgtctgaagctaagcccgtatacgaacaccaacacaaggccagccaaacaattgaatgcactattcagcggacaataggagtatattattagtgtattgctcagttgaagacttgtagcctcatcttttgcactgcaagaagtactcgtgttactcatggctaaaaactcttcacgtcagtttgtctgcagcacgtgcgtgtgtgcaggtttatctcagttcctcacaggattacggcgatgacgacgagaggcctttctcttctctgaccgtctttcgatcgcatccatctgcattcgtgcagagtagtagtcggctgccgcttctgttccaggccgagataaagtgacaaaaaccacggcctgcaaattcaacatctgagacactacctaccaaaaagccgaaatggtactagctagttatgacttggttgcatggattgctggtagaggtttggttgaacactactactacaacctctagatggatgtcttttttcttttttctcacctagtatctcagctgaacctaatgatcgatgtgttgtccatatccattaatccatatgcagctctgaactgtactcctctgaagcagacaggtagttgaactggctgtacgtttcttttgcgatcagatacatgacaaggagcatgcttctcggtttagcttacgcatctgcagaagccaacgccgaatgatggtttgtgagcagtgaacgactacgaaggcgaaagtactattgtgtgattgtgaagcggtatattagtcttgtatctctgactctgtcattattcgagttttactcaactgacataagtttcggtcctttttttaaaagaaaaataatggatagaaatctggcctctatatgcacaagtggatatacacagcaaatgattgagttacagtctctgcccctctttaaaatgctacgacctatactctttctttttgcaaacatctctttcttgaactctgatcatgaagaaaaacagagttttcttgttttaaatagagctaaaactgaacatctttggttggtaggagtatttttctgctgcttttttttctcttgtgtagtttagttctatccataaaagcatttggctaggcggcaggagcaacgagaaatctagtagcagcatgttacgaacagatagctgaagcaagctctggatctggtccttcaatctcgcatctacttgcagttaggaattcaattgaagcttgcggctacatcacgccatgtgcagatgtggcctctaatgatcaacttaactgttcgtctattgggtgcccctgcagtaatcatgcgcttgtatataaaaggtcctgtactgtggagaaaattagtgaatagtgcggacaagtctcccaggaatcttgcatctttgcatttgcagctgcaagcaagggtgtcaacctcgttgcactgacacaattagctgtcataaatgggggagtttctatcggtgagaaggatcgctcatgcccccatggctgtacatcaaggttggaggagcaaacgaacaaggcacgttgacgtctgaactagaatcatttttgaagtcttgggccgtctttagtccctgtctaattttttttaaagtatacggacacacatttaaaatattaaacgtagtctaataataaaacaaattatagattccacttgtaaactgcgagacaaatttattaagcctaattaatccgtcattagtaaatgtttaccgtagcaccacattattaaatcatggtgtaattaggctcaaaagattcgtctcttaatttacatgcaaactgtgcaattggttttttttcgtccatatttaatgcttcatgcatatgtccaaatatttatttttttaaaaaaaaattaaaaacataagtcacgaataaaatattattcatgtttttttaaaaaaaattcaaataagacgaacggtcaaaattggacgcggaaaaccatggctgcacttattttgggacggaggaagtagtatttctcgttatgatctccactgctggtggacagtagagcaaaactgatcaacaaagaaaaaaacatctaggttgtgtttagttcacactaaaactaaaattaaaagtttggttgaaattggaacgatgtgatggaaaagttggaagtttgtgtatgtagaaaagttttgatgtgatggaaaatttggaagtttgaagaattattttataactaaacagggcgctactcttgtatgcatcacaaactgagtagctagtacaaggctgtgttcagttccttttaaagttgaaagtttaggttgaaattggtacgatgtgactgaaaagttatatgtgtatgacatgttaatgtgatggaaaaagttgaaagtttgaatccaaagtttggatctaaacatagcccaaagtacatccaatttcaacagagttgggagtttggaccatgaatccaggcgtagtaccactgcttattgagaaacacacgcttccatgataccgaccacattttctcgtggtaggtacgaataacaaattgtaacagccatcctcgcgagctgaccaccatgattatatagcgattggccacctgcaaaagttagtctgacttgaacatggccgcgtgtctcctgcattttcgtgatcttgtacagttgtaagtaccatcagaaatagatactgctacaaatcagcattttcgagaatagtgtgtgtgggcgcgcgcttgacaagacgaaatggatgtgaagaacttcttcagagaacgagcagcagctgtaaaacaaaataatttactttagtcccccaacttatacaaatttacagcaccaaaagtttcagaaagctgcgtgccaggccatgcggaactgcaggttatggcaaccgcagaagctgaaacagcaacagtaacatcaagttaactacaaagaaccgtaaaatagtatcatcaccatgttcatctagacatagtagaaaacattcacactctcgaaatgctctctatctttcagttttgtgttgctatacgtcttcttgttttgcattttttttagtattccatttctgttcagcagagtggcagtggcgcgccattccattccttgaggcattcgagcagcgggtcgatgtgcttgcgctcgttgatggcgacgagcaccttgttcagctcctcgccgggcgaccgcgtcttctcgccggtgaggtactcggtgccgacctcctcgcgcacgaaccggtagagcgggtacgagcggcactccttgatccggttggggacgagcggggtgccgttctcgacggcggcgcgggcggcctccacctccttgggcagcgcggcgcggacgtgctgctcgaactcggccaccttggcgaagatggaggtctccaggacgcgctcggcgtcgccgttggcgagcgcgtgctcgatgagcaccgcgcggagcttctgcatcaacgggtagttggcgctgcaggggtcgtcggcgtaggcgaacacggcctcgcggtcgatcgcggtgagcaggtccttctcgcagaagcgagcgatgtggaggccgcccatgtggttcatgctcagggatttcttggccacctgcatcacgcagttcttcaccgcggtcttcatgttctcctcgaggtggcgcaggtcgatggcttggcacagggcgatcaagaacgtggaggacatgagcttcaggatgtcgatggcctcggcggtcttcctggaggagatgagaccaagcgagttcacgtcctggttgtgctgctccgcgctctggacatggttggtcaccgggttgcccaagaactggagctcggagcagtacgacgccatggcgatctccgcgcccttgaacccatagtccaagctggggttgcgtccaccggacaggttggaaggaagcccgttgttgtagaagtcgttcacgagctcagagaactgcgcgaacatgagcttgccgatggcagcgagggcgaggcgggtgttgtccatggacacgccgatgggcgtgccctggaagttgccaccgtgaagcgccttgccacgggagacatcgatcagcgggttgtcgttgacggagttgatctcgcgctcgatcgacttggtggcgaagcggatgacctcgatctgtgggccgagccactgcggcgacgtgcggagcgcgtacctgtcctgcttcggcttcatcaacgggtcgagctcgccgagcttcttcgccagcttcatgtacgagctgccttccaagatgtgctccatgatggcggcagcctcgatctgtccagggtggtgcttcagcttgtgtgtcaggtggtcggtgtactccggcttgccggtcatgacctcacagaacacggcggacaggacctcggcgaggatggcaaggacgttggcctcaaagagcacggtcgatgcaaggccagagccgacggcagtgccgttcaccatggcaagaccttccttaggctgcaactcgaagaagccgtgctcaatgccggcaatcttgaatgcctcggcggcggtcaccttgcggccatccggggcgacggccacggagttctggcggccggtgatgaggccggcaatgtaggacagtgggaccaagtcaccggaggcggtgatggtgccccggagcggcaggcacggcgtgacgttggcattgagcagcttggtgatggcctcgaggatctcgaagcggatgccggagtaaccctggaggagggtgttgatgcggacgagcatcgccgcgcgcgtcgcctccgccggcagaacgtggccgtcggtgccggtgccgaaggcgccggcattgaggaatctgttaaaacagagcgatagacatgtcaatttcagttcagagctcactaaaaaaaaacatataacacgttcagaaaaacttggtcagatatatgattgcgtattctctttccgtattttccttcggtgtacatacacactgccgccgtgccgactgatgattaatttagagtttcataattgcttaattaattatgctccccatgataaggagagcaaacaagtcagatgcgcgtagttgtgcagctgtgcagaactgtcggtcaccgccatgtggtaaaagtcaaataagtaccaatattgttctacatcacgtttaaataacgaaaaacaaagtgttttggaccttatctcggatacgaatactacaactactcgtccacaactccacatgttcagggtattttgactatttccccttcaattttatttgcatactgtccgtttaataattggacgctcccaaaccagtcgatgataaaacaggaaaggaaaaccagagccgtgaatttgtctgtctccctgcgaggacaggggatgtgtcaccaaacctcagctcgctttcgccgtaacgtggccgtgggaaaatcccccgaaggcaggccagcccactgcccacgtcgtctccatgtgaagttttctgcgctgccgaacgctttgtccggcgccccgcgtgcatggcgtgagtcgcgacgcgacggcgccatcgcgccaacccgtcggccgaaccgagcaaacgcacgcagttggtgttattactactcgcgttgatatgatagcccagcagctgcctacccttggccccggatggccggataccctcctcgagatcccgaattctcgctcggcgacagaattatctcatggataaacatattatcaaatgtcccgaaaaagaaaagagagaaaaaggttgcttcctttctccttctcctctcctcagacgaaagacgcaaaaaggagttctagcgacgcgccaacggacacataatcgtcgtcttgtgttttcactttctttttagttaacacgagtcgtgttcgtgtggtgcaaattaaaggtgtaacagtgcaggacggttactactagtagccggttcagatgtggcatgaactgagcaagaggtacagtacatctgcgtgtttggatggtggcgagaagtaataaatatggtgatgattttacccaaatactacagctggatggatcataatagtgtaataatggcgaaggatatactccagtactagtattggctggctgacaccccgaaagaatcctttttggctccgagaatgacggtatctcgtgggcacacacacaactatgcagcgagagcacatgcaagcgcatctagttcgccccacaagttctgagagattaaataaactaatatggtgatcctcaatctcgtcgtaatcatagaatcgaactgctgatgtaaagactgatgaacaatggaagtgaaacaaaataaaggatcgagcttgcgatcgatttgtcacctgatgagctccctctggagcgcgccgccctccttggtgcggcggtgggaggtggcgccgaagccggtggtgacgccgtagctgtcggtgccgttcatcatgctgttcatgacccagtcgctgctggccttgacgcggccgcgggcggactcgtcgagctccaccctggcgtcgccggcgccggcggccacggcggccacctgcgcgatcgtcaggctggcgccctcgatcttcaccagcggctggcggaagtcctccaccatccgcttcacctcgtcgaggtggctccccgccagctcgtccgccgccttcccccagttcagtgggtcggcccgcggcggcgccgacaccgacgacatgcacagcccgtcgccgttcagggaacgaacaagcccggtttcgcactccattacagatgtgtacagtcacacagactcacagatgcagtagtagcacacgaatagaagtacaagaacactagaacagtactactagatatgcgtgttttttttcttttaagtagaagaagagctcgagttggaagctgatgctcttcttggagaagaacggtgggggaacgggcgcttaaatagcgtggcgacgggtgatggtggttggggctaagggcgtccagggcagtgtggggtttggttgttggctagctgaccatacgctcgccgtcggatggggcctgcctaccaatcttaccatgcggcgatgcgcgacgcgtggcccacctggccagctcgcgtggctgctctgcctgcaggattgtgattggggcgaggcgccgagccgggggaaccggttggttcggcggcggcgcttgcgttgcgtgttgcctcggtggtgcgtagctgtgtggggtgggtggctggagacttgcgcggccgggggatttggcgggggttggtgggacggagagagcgagcgagagcgcgtgtgtggacgggaggcctctgctgagccaacgctgacggtctctcgcggtcagtcggtccgtcggtccgtcggtcgctcgatccggtatcgtcctgtttttacacatgcacccactccgagatccgagacgctgcaggagtgcaggactgacccaagtggtcatcaggacaacacgatgaaatgacgtgatcggttcattattcggagcgcgaattgctgcagagcgaagggtgtgtatacgagctatttattaagcctaattaatttatcattagtaaatgtttactgtaacatcatattgttaaattatggcgtaattagactcaatagattcgtctcgcaatttacatataaactgtataattggtttttttccacatttaatgtctcatgcatatattcaaatatttgatgtgactttttggctaatttttttttatctaaacaagaccgttcagaaactacagtcaccttttggctgtgcgagatgtggaggaattgcctcaacagggccattttggccaacagcactacagcagcagcagaaaatgggcttaaagcttgtagtacgtccacacggaggcattttggccaacagcttatgcagctataaaatttaaatttaaaattttaattgtagagttgatttagggcttttcttcgtagtttttttagcattgatttttaatcgctaaatatacatataaaaaattatctatgaattttcttttatgataagtcattttcagcgttaagccaagcgatgtgtttgcaactctctctctctctcttttggtacagacgcgttgagctcaagttgccgcatttgattctgtaccaacagagaacttccaaggaaagcaagttgaagccttcagagttcagacaaaatgaagcaaattgtttagtttttttcctcgtgtattatgcagttaagcaggcgctatgttgcgcgtaaagaacctggtataaacaatgatttactcccacattgtcccgaagagtagcacgagcacagttgaaccatgaagattccacgtttcttactttaagaaccaggaaatattaaagagccggttcaatgggaggcaggtacagcaatgcatcgtccatgtgattattttttgtccatttaaaagggctgtcttaatatttttatccacactttttgcgtgtggttggtaacaacgaactcatggtgaccaactcagcttgatggccaggtcgatctactccgttgtggttggcaactaagctcgcaccaaacagggtgttgggtatccgggccctcccgtaagttcattcagacaacgtcattcgtatatctcctccaccaacctcctactacttgcgttcttcatataggagctgcgaaaatgttgctgcttcaacgttcttcagataagcaaccttttttttttttaagataatgagataagcaaccatgagtgacttcattgacttcaagatggatggttggcttggtgtttcaaaggtccgaggtttgttgaaaatttagggtgagttcgataaagggagtacgtactaaatccattaaaaaacttattttatttggaactaataccttacattgatcaatttggcatggtcaaaatgatatagttttcaataacaagaaattgtctaaccacatgcaggttatcttcacgtcttccagttgactctattattaatccttgatgctttcataggagaagtgggagactgtacgtaatgaaactacactcttagaatcggtagccacgagtcttttgtcctactttggttggtgtaattttttttagaatattgttataggttctatgtgttttctaactgatattttgtttttagaaagaagatgaggtttgtgtcccataaccttaagcttttttatctttttttttttcttgactcattagccgtgcgcatattggcagaaaccggagatgtaaatcattttcattatgtaaaaaaaatacttagttgtacgtaaaatgagatgagtaattagtgtatactacctccataccaaaataagtttatttttcacccatctaacacataccaataaaaagtaaaaaaaaattagaatacccatactttatcaaatcccaatacaactaatcctcactgtatctaatcccaatacaattactccctccggtttcattttaattgacgttttggacaatgatacggtctacgagatatatctttgaccttattttttttattataatatatataataaataaatgcatgtttacttttattatagtgctttaaaagaaaaatctatatatgttgttctaattcctttaaactaaatatttataaagttattgatggtcaaagttataaaagtttgacctcaaccttgttcaaaatgtcaattaatatggaaccggaggaagtattccatactttcacaaactccaatgcaatgattactctaaaaataaacttagtttgggacaaatggaaggtgctaaaaatgaacttaatatgggacggaagaagtaactaattaggtattaaatactactaatttgaaaattgattttttttaaaaaaaattctccatggaaagtttttataccaaacacatcggttacccgttcggaaaacatgttcacataaaacgagatagtagctctgcttagaagccctctcgaacgcatccttagaccaggagtatgcttctataaggccataggaacgatctactatatttgatcgaggggattgtttgtttctggttccatcagcagattacataaatacacacactcaatacaccaaaataataaaaacaagaaagagtaaaatacacaaccaattcttaaacttgaaccatagtgttatccagtaccgtgagcttgtaaaatgcacatctaagtccatatactcttattttaatgtatcacccaagatctaaagtgcaaattaccaggacgctaacatggccgtccacgataatgagaattttgcattttagaggaatcaagaagtaccagaggtcagaaagaaattatcctagtaccattttttagaagttgtgtttttaaatacactaccggagcatttgaaacaggaaaaaatgtttactagtccaaacacaaaaagaatcgtaaattatacttcaaaacttacaaaacaattactttagccgcttgccaggttattccctaccaggttgtggtattgcaggtgtacattgaagaatccttaacacaacaaatgtataaaaaaagtttgatcagctacttgtactggtataatccacactactcgaaacaaaccaccacctctgtactcatctcatcatctcctgtgaggttctgatacaggggtttagcagatgggcaggggcgcgccgttccactccttgagacactcaagcagcggatcaatgtgcttgccttggttgatggcgacgagcaccttgttcagctcctcgccgggcgaccgcgtcttctcgccggtgaggtacgcggttccgagctcctcgcgcacaaaccggtacagtgggtaggagcggcactcggtgattctgttgggcgttgccgccgtgccgttctccacagctgcccgtgcggccaacaccgccgctggcagcgccgcgcggagctcctcctcgaactgggcgaccttggcgaacaccgaggtctcggcgttgaactcggccgcgccgttggcgagggcgcgctccacaagcacgttccggagcttcttcatcagcgggtagttggcgctgcacgggtcgtcggcgtacgcgaacacggcttcgcggtcgatctcctggagaagatccttctcgcagaagcgagcggcgtggagaccgccggtggcgctcgtgctcagagtcttcctggccactgtcatgacgcagctcttgacggcgctcttgacgttctcctcgatttgccgcaggtcgatggcctggcacagggcgaccaagaacgtggaggacatgagcttcaggatttcgacggcctcggctgtcttcctggaggagatgaggccgagggagttgacgtcctggttgtgctgctccgcgctctggacgtggttggtcactgggttgcccaagaactgcaactcggagcagtacgaagccatggcgatctcggcgcccttgaagccgtaatccaagctcgggttgcgcccgccggacaggttggagggaaggccgttgttgtagtagtcgttcacaagctctgagaactgcgcgaacatgagcttgccgatggcagcaattgcgaggcgagtgttgtccatggacacaccgatgggagtgccctggaagttaccaccatgaagcgccttgtcgcgggagacatcaatgagtgggttgtcattgacagagttgatctcgcgctcaatggacttggtggccgcacgaataacttcgatctgagggccaagccattgcggcgacgtgcggagcgcgtaccggtcttgcttcggcttcatcaacgggtcgagctcaccgagcttcttcgccagcttcatgtacgagctgccttccaagatgtgctccatgatggcagcagcctcgatctgtccagggtggtgcttcagcttgtgtgtcaggtggtcggtgtactccggcttgccgttcatcacctcgcagaacacggcggacaggacctcggcaaggacagcaagaatgttcgcctcaaagagcaccgtggaggcaagtccagagccgacggcagtgccattcaccatggcgagaccttccttgggctgcaactcgaagaagccaccttggatgccagcaatcttaaacgcctcagcggcgttcaccttgctgccatcaggagcgaccgcgacagagttctcgcggccggtgaccaagccggcaatgtaggagagcgggaccaggtcgccggacgcggtaaccgtgcccctgagtggcaggcatggcgtgacgttggcattgagcagcttggtaatcgcctcgaggatctcgaagcggatgcctgagtagccctggaggagagtgttgatgcggacgagcatcgccgcgcgcgtggcctcggcggacaggacgtggccgtccgtgcccgtgccgaaggcgccggcattgaggaacctgatgagctctctttgcagggcaccaccttccttggtcctcctgtgggacgtggcgccgaagccggtggtgacaccgtagctgtccgtgccgttcatcatgctgttcatcacccagtcgctgctggccttgacgcgctcgcgggccgactcgtcgagctcgaccctggcctcgccggccgcggccaccgcggcgacctgcgcgatcctcaggctggcgccctcgatctttaccagcggctggcggtactcggccaccatgcgcttcacctcgtcgaggtggctccccgacatctcctccgccgccttcccccagttcagcgggtcggcgcggggcgccgccatgcagaggccgttgatgccatcggcagcaacctgaccgttctcgcacgccattgcagttagctagacggccggagagaactgatgattgtgctaaatgagcaggaggatactagagagattgatcagaggagtatgcaggcagcggtgtgttcagagctgtggagaagagctaactgggatgtgtggctcttcctggagagaaatggagggagtggaagggtttatattaggcttggagatatgatacgagtggcttggtcagattggttcctggtccaaggcgacgaaacggctgggtctcctcatcagtccgacgaagctgagtgtggtgttagttgggggtaagaacgaacaaacaacatgtgtgaatcgttcgatggaatgagtatatttttgaggagggtcaggtgtggacgtcgaaatttcgtggtcgtctttggggacgcgggctcggtcgcagactcgcacggggtccgtggttgcctggttggtgcgcgccatgcggttggtgaaagcctgaaaggcagaaggcgcaatgcgcgcgcatgctttgcctcggctcggctgaccgtgcttgcacagttgctcgcttttcacttcgttgttcccagttcccacgtgaggccattcacagtacaagcacctcatttgcgttacctcagtatgccacgtaggatagatacacaacgaattcatacctctcacagtgcagggtacaacaggggatccccaaaccaaccaccccaacctattctctctcccactttcccctttctctccttttccctttccctctcctactttcactcccaccgacccgacagagccggagcgcgcggcggtactggtcgccgttgcccaccgtgtaacatcccggcctagggcttaataggattaatagaatactcatatcaacaagttgcaacttcttttccggaagccaatctccaaataactccagagttaagcgtgcttggcctggagcaatttgggatgggtgaccgatcgggaaattctttccgggtgcacacgagtgaggacaaagtgtgcagaaaagatatgtgttggtctgtgagggcagtctatgacctatgaaagctatcagatgtaagcgggcccggcctgggggaaggcgggacgttacaaattggtatcagagccgactctcgcggtttcacgggcgcgtgtgtcgcagttgcgcaggcatggtgcgcatggctggtgtagaccgggagtggttacacagcatggcacatgtgctggcactggacacatggacgtggccaagagaggacgttcctggcctagggttgatcgacgggggcgtcgatctctcttaagggggtgagggtgtaacatcctggcctagggcttaataggattaatagaatactcatatcaacaagttgcaacttctttttcggaagccaatctccaaagaactccagagttaagcgtgcctagggcttaataggattaatagaatactcatatcaacaagttgcaacttctttttcggaagccaatctccaaagaactccagagttaagcgtgcttggcctggagcaatttgggatgggtgaccgatcgggaaattcttcccgggtgcacacgagtgaggacaaagtatgcagaaaagatatgtgttggtctatgagggcagtctatgacctatgaaagctatcagatgtaagcggacccggcctgggggaaggcgggacgttacacaccgtccccgcgaatctctcggcggcgacgagaaggcggagcgaggaggacggcggcggcgcgaatctggagcggcggcagcgcgagaggacaacggcggcgggcggattctggagtggagcggctcgtgctcgtcgtcgccgtcctcggagcggtcatggcgggcggcggcggcggcacatccttgccccgctctcctcaccgacggtgctctcctcaccgcctgccccaacgccgcggtggcggcatcctcgggacctagcggtgcggatctggagcgtcctcgccgtcctcctcaacgacggcggcggcggcgcgtcctcgcccgccctcaccggcgacggtggcgcggattggagctggagccggagtcgtcggagtggaaggagtttctgctcgggaatcaaggtcggcctcctgcacagcgcgttctcgtcctcgcatctctcatcggtgggccccgcgctcgactttttgagcgaggctctcgttccttcgctaggaaccgaagaagctagtgaagctatgggccccaccaacttttttcaccacgtaggacgaagtaaggctccagctagacgaaggaacgcccactgtgaagggcctgatgctgagatggaatgagcctgtgaagggcctgatgctgagatggaatgagccgctgaaagggtagtgcttcactcactgcttgtgttatctttcagcacattaattaaagagcactgcgaacacagtttaattctagttgatttgtaccggtctttgtttggaatgaattttcccactatcttcatcaggcagttttgtttctgttatggtatcctacgtttcttctggccgttttcagtgtggctggattttttatataaaaaataaatttagataaccttatattttggagttttttttagggtccaatagtaccgagcggtaccagggcggtaccaaatgctagtcattggatctgtcacgatccaatggctggtgttgcgtggtaccgtgaggtaccaaaaatgtccctcaggcggtaccgcatggagaagatgattggtagggtaaaagagtaactttgtatgccagatggttcaggacggatggatcgggaagtattcctctgccgccaccggcgttttcgtctgccgacgcggccgtgttattcctccggcgccgcgacttcgttttgggccctctcgccgaagcaatatcgattgcggcgcgcatggttctcccctctcttctccagcgctgcgaagacgccgcgccgcctgtctgcaacgatggacaacgcgaaggacacggggttagggtttcgcggtgaaggcggaggagtcgtcgcagtctggctcacgcgtagattggaggcgcacgcacggctgcggaagaataccgagctcgcgattttttctctcccgatcctacccatgcgaaattcaacggtgatatgcgtactggcggtaccagtaccgtgcggtacatgttgctggaccacaaagacgctctatattttgagatcaaattgggttcaaaccattgatattatggtttgcgctacacaacaatattttgtatgctctagaagtttcacaaaacccgccttattcaaatattaacttggttttccatctttggcatagtattgtttaaaatatcaaaacaattaacttatcatcttcaccaagcaatcaacatatcaacaatatataaaatttgtatggaataaaaataaagcaaacgtatctgcacattttaccctatattatttagattttaaattaatatgatgttttgatcaatattaagaccataacctagcattttgtcataggctataaggttgggtgattttttaaataacaaaaatgataaaactacaattattttgaagaaactacagttagtattccctccgtttcacaatgtaagactttctagcattgcctacattcatataggtgctaatgaatttaaacattatctattatataattaaaggaatagaaaaaggagcctccacgttcgctctcatggcctataaattctcacattaataaggaaaaaaagaaaaaacagagtccatatagaaatacaattaggaataactgaaattcggaattaaaaataagcaatattagaatagagtaaagagtccatatagaaatacaattaggaaataactgaaattcggaattaaaaataaggaatattagaaatagagtatagagtccatatagaaatataataaggaaataactgaaattcggaattaaaaaataaagaataatagaagaggatactagagtccatacagaaatacaattaggaaataactgaaattcggaattaaaaataagcaatattaaaagtagagtaaagagtccatatagaaatacaattaggaaataactgaaattcagaattaaaaataaggaatattagaaatagagtacagagtccatatagaaatgcaattaggaaataactgaaattcggaattaaaaataaggaatataagaagtagagtatagagttgtaacgctccgcttttcgtgagacgttaaaaactaattcggcaaaatcctaattgcgaaaatttcgttctttgagtgttgagtctaagctgtgccaaagatctcaatctaaatccctcccttgtctcgataccctgttatcaaagatcgtctcctcaaaatttccatcccaatatagtcccgaagctcgatttcttctattcggaatcccctcctggaaccccatccgtgaactttgtcgaatgcccgaaacctaactccgtccaaggattcaccttcgcgtcataagctctctccttggttccttcaaaccgattctcaaattcgatttcaacctctcaggttttgattcatctatcttctccatgtattggttcatcaatctacccttgtcttctttctcgaacttctgacccaagtctgaatatgcaaatcgagatcacttccacccttgaactcaaaatcccaagattcaatccctttcgccctgagttctccccaaaatgattttcgttccgaaatagtctcgaagtccgaacccttctatttgggcttctctccaaaatccatacccacatatctcgttgagtagtcaaactcaaactcccaagttacactctctttctctaaattatccatcccctgttgactcgtctccgaatattgttcccttcctcgactccttcctattctcccgagaccgagtatcaacctcgaaattcgaatccagactctaaccctaaaacctcccaattaaatctctctgtgaaagtctattgaacctccctcataggttggattccttcatcctttttccggtccacctcttccttctcttccatcccatctctctctgagtctcgatctatctatctatcgatcgatccatctatctatctactatacctatctatctgtttatctatccatctgtcaatccatctgtctacccgtccctctacctatcaacctacctttctgtctatctatctaaccatggcattctaccgctatctcccttgttccatttttgaataatgatctttcctttttgaaatcctctgaaataatccttcgtgccgccaaatataaatccatcccaaaaataccaaaattcctgcttttgaagcccttccttgaccccctcccttggatccaccttgaaccctcgcgtacaaatatacaaattgaattcaaattcaatctccacatcaaacttctctccaaatcaaaccttccggtaaaagtctattttacctccctcgtgatgatttgggccgaaacctgccgctggcccatctcttctcagctccctccatctccacgtgcgccgcacgtgaccaccgagagagagagagagagagagagagagagctctctctctctcccttccctctctcggacgttctctcgctccctcgtcctcttcctctctctcgctgcctctctctctcgttcgatctctctctcccacgcaagcgctgccgccatcgccgatttcccgctgccgcctttcgattttcggctgtgccgctcgtccccgcgcgcgcgcgcacactcgtgaccgaccacccggtcgccgccgacgccatgcgctgccgccttgcccccgctccatgccaaaccgaccgccgccgtcatagtcgacgtcatccatggcccccgccacgccgcacccgtccaagagtgggagaagcagctgctctccctctcctcctcctcctcactctccctctcctctttatggcaagggaccaagcccctttccccccttctttttccttttccccgaccaccgccggtgtcaccacctctgagccgcttgaccgctcgcgccacctgcctcatctccttgaccgccccaaggtcggttctctcaaaccgacatcgccacctacaagacccacaccccctcccatacctcccgcttcctctcctccatcacaccactgccgcctcgccgttcgtcgtcgttctcgccctcctctgccgtcgtgtgtgtcggagagctagcgagcacgaggagtcgacaaggagctccgcgccgccccatcctcgcacctctccatctcttcttccccgaccgcgccttctcggtgccgcgccgccccgccgacgcgtccgcctcgctgcgactccatccgcgccgccgacaccgtttctctcgtcggtgagctccccactgaaccccttttcccttgtcgcacgccgcgccgcgcccgccgccgttcgtcacatctcgccgcgcgcccttgctctatcctgggcgtcgctcgccgtcgatcgccgtcgccggcctctctcggcgtcgcccgtgccctctcggccggtggaatgagctcgcgacctcgcgtagatgctccagctccaacgaatcgaacccccgttgccccggtgaagttttccccctttgctcgccgccgacgatcgccgtcgaaatccgccgccgtcggctcccctcttgtcaatccctctcgccaccacgctctcggggatccccttgatctcccccttgctgtcccaaggccgtcggccttctcctttctctccgcgccatgtcgccgcttccgccgccgcctaacgccgccgtgcgtgcgccgccggtgaccatcgggtcccgcgtcaccacgtgcgcgtcgcaacaccataccggttcggctaagcccgagcccgcgcacccttcgctcttctcgcgcgcggccacgtcggcgtgccgtcgtacctcccctctcaaatccgtgccgttaaacggatcccccctgacctcctctagccgccggtgctggccgctcgctccggttcgccaccgctcgccggaacgcctcgcgtgtcgttggccgtccgatcccgggcgcctcctcctcctcctcctcccctttcgcccctgcccgcgtggccggccacgtggcagccacctcagccccgggcccgcttgactgggtcaagtcgcgcccagtcagcctcctccctccgtcctccctcccgtgcgcgcggtccacggcaaaccgtgcggctgcacgtgggcccaccgccatccgtccacccggcgcgcagcgcccgaaccgcgcgcatccaaaaccctagcgcccgcccccgcgtgcgcccccccaccgtgaacccaaccaccgccatgtgggtcccgcgcggtggaccgcgtccacccgcgtcggcctctctctccccgcgcccctaatgggccgaccacccgcgcccgcgccggcccaatggcctgaccgcgctgcgcatgacccttgggccgagcctaagccgcccgagtaagtctaaatcacatccctccttcaatttctttccaaaaagggtttaataaattattaaatcctttttcctttgattagtaaatccaataaacttcgaaaatccatatattccaaaccgctcatccgattgactccgttccacttccagtaattctgtaaaattgagatctatttaatggcactactaattagtttaaataggatctttcttttggtcctttgtttaggttttcgattgtttgcgtatagttgcggttatcggattttcgtcgatcgcgggtttcctcgaagattcgtgaagcttcgtgaagaccttgagcaaggcaagtcaccctttgatcaattgcccctataattgaaaagtcattattattttgtttgcaacttgcattagtagaatcacacacttaacttgcttggcctcggtttgcgtgccaaaccgacggacctacccagtagtcgctctaatttccgtaggtcgtaataccctgtttccttgtcgctccacccttgtggtacctcggtattcgtgctctttgagcgcgtataccaaatatcccacatacaccgttgtttgtcgaaaacttgggaaatgggtttgtgaagccttcaaaacccgacatgtggtgtcggtgtgtttgaaaataaaatgatttgtgaaaactcgcgatgcgggggttgtgcctatgtggcactgtcccgtattcgcatataaggaccgattcctgtgggaaactcatcgaacataatcaaagtgcaaccacaaggtggaatgggacaccctggctaagtaactagtcggttcagggaaacctcgcatgccaatagttgggaacgccggggcggggtcggacaaaccgggttcctggtaaggcaaggacgagaagcttgctcacttaccgatcaaggtggttggagtttgatttgtgaacgcctaaaatggcctatgtttatgtgaggatttgatccttctatgtggcatgaggtaaccctgggtcggcttgggaaaggctttgttgcgaacctccgataccgacgggtgatcggaataagttcgtatcttgtgggtaaagtgtacccctctgcagaggttaactaactgttcgaacagccgtgcccacggtcatgggcggatgtgaggtggttcccattgcgtagatttgtttgcctgtgctttgtgaaaagttgtttaggtgtgggaatcgtaaccagaatcagcctatgtggcagatggatgacctgagtggtcaagaaacgaatctgtgtgattcgggatgtctgcggacatcatagactaggcttcccgagtggaagcggattgttgtgctgctaggcagctggactctgggagtccgagaaaatgaaaaaaactctgggagccgattaatcaagtggaatgactctgggagccgagaagtaatgatctgacccgggaggtcggtacattactaaatgagctgttgaaaaaaacatctcttaaagtcgaatcgagatgcaagtctcttttcggcccaaacttagaaagaaataaatcacttagtgattttaaaatgtcttcaaataaaagatttgcaaaacaaccttgcctctcttccaagcttgcattaaacacctaagttcccgtgacttgctgagtacgaaagtactcacccttgctctatataaatatatacatatagttcctccgccctgaagagatgatgaagtgaagtgaagattagggtttcgtcctggttcctagccgtcgcctgtggtgttgggtgttagaccgttggttccgctgctgctgctgctgctgctgctggtgtttcctcgtccgcgtcgtcggttgtattctcgggctgtctgagctgcaacctaagttgaggtaaataagtcctctatttattttaagggttgctatgattcatatttgtcaccgtgggtaccagcactatgtcctgggactggtaccgagatcgcggtttcgtaggaagcggttcgcgccgttttccctacgacacgctcctgtcaggtgccgttgtacggcggtatcagattggggtgtgacaagagtccatataggaatttaaaacttactaaaatttagataaacataataaaattaaaagtagagtttagagtctgtataaaaatacaatttacaaataactaaaatttgaaattaagaaaaacatgggaagaagagtttaaggtcaatatagaatataaatatagtaatacaatttagaagtaaatgaaattcgaaattaaaaattaaagaatattgaaagatgagtttagagtccacatagaaataaaattagaaataataaaaattcagaaataaaaataaataatattggaagaagagcatagagtctatatagaaatagaatttacagaaaattcggaattaaaaaatagaaatattaaaagacgagtctagagtccatataggaatatatataatttacaaataactaaaatttgatattaaaaataattaataactagcacgcatataaaatataatatgaatattacacattgtagttttgtaaagttattgtaaaatttaaaattatgttgtcattttaatatatttgaataatataatgagaaaacataaatgctattatatgagataaaatataaagatgctagccgcgcaatctgcgtgggccaccatgctaattatatatttatatagatttattagcatctatatgaatgtgggcaatgctagaaagtcttacatcgtgaaacgtaggaagtacattttagtacgccacattgactgcaatatagactcatcagcataaagtcatattggcatgtcagacagatcacaaccgtcaaagcgtgtttttatccctagatgggatatcctatcattttttgcatgtcacctaaatagtcataaaaaaataaaaaaaaattgatacaaaatatatcactccacatacatataaattgaaaatcaacttctacaaattataacaaaaataagtgtgaatatacgttaacatgtcagtttaattttttttaacttgtaaaagttgaatttaaccgtgcatatttatggagtaatatttcatattaaactatattgttattttctttcaaatttcttgatgaccatttaagtgacataaaaaaaatgagtggatgttcccttgtgggatgaaaatccccactaaaggtatataaaagaaacaagtcgaatggggatggattctaaactatcgaggggacatctcattgttatttgtatgtcatccaaatggttgtgaaaacaaattaataagttcaatatgaaagattaatatgtgatagatcactgtgcaaacataaaagttaaaattcaacgtctacaagttaaaaaaaactatgactaattaacatatatccatagttaaatttgtttttttttcgttgtaacatgtagaagttaaatttgacattgcatgcctgtgcagtgatttatcacgtattaatatatcatgttaatttttctcataactatttaaatgacatgtaaaggggtgtcgtttgagagtttagaatagttttacaagtcaaatctctgaactgttattatttagtcactacaattattttcttttcaataaaagaaaatttctttttgaagccatatttatgcacattttacccaatcagtatggattacattgtgcgcagataggtcaaactcggagtaaacaaacaactaaaaggaaaataagaactctgccatgaaaattaatgatttgcaacactctgatatccaaaacttatatgttacaacactagttgcttttgaaacctgccactcgtaccaagttttgctgttgcatgcttgccgctatgcaacgaagaattcttttgagtaacacaaagataagtgtaaaaataaaatattcaccagataaaaacaacaccgcacgcctccacactccactgttattcagctaatcggttcactagttcagcagattggcaggggctcgccgttccactccttgaggcactcgagcaacgggtcgatgtgcttgccttcgttgatagccacaagaaccttgttcagctcctcgccaggcgatcgtgtcttctcgccggtcaggtactttgttccgagctcctcgcgcacgaaccggtagagcggatacgacctgcactcggtgattctgctgggaatcgccgccgtgccgttctccacagccgcacgtgcggcctcgatcgcacctggcagagtcgcgcgcagctcctcctcgaactgcgcgaccttggcgaacaccgaggtgtcggcgttgaactcggccgcgccgttggcgagggcgcgctccacgagcacgttgcgcagcttcttcatcagcgggtagttgtggctgcacgggtcgtccgcgtacgcgaacaccgcctcgcggtcgatctccttgagcaggtccttctcgcagaagcgtgcgacgtggagatcgccggtggagttggtgctgagtgtcttcttggccaccgtcatgacgcagctcttgacggcgctcttgacgttctcctcgatgtgccgcaggtcgacggcctggcagagggcgatcaagaacgtggaggacatgagcttcaggatgtcgattgcctcgtcggtcttcctggaggagatgagtccaagagagttgacgtcctggttgtgctgctcggcgctctggacgtggttggtcactgggttgcccaagaactgcagctcggagcagtaggaggccatggcgatctcggcgcccttgaacccgtagtccaagctcgggttgcgaccgccagacaggttggatggcaggccgttgttgtagaagtcgttcacgagctccgagaactgcgcgaacatgagcttgccgatggcagcgatggcgaggcgggtgttgtccatggacacgccgatgggcgtgccctggaagttgccaccgtgcagcgccttgccgcgggagacgtcgatgagcgggttgtcgttcacggagttgatctcacgctcgatggacttggtggcggcgcggataacctcaatttgagggccgagccactgtggggatgtccggagcgcgtaccggtcttgcttcggcttcatcagtgggtcgagctcaccaagcttcttggcatgcttcatgtaggagcttccctccaagatgtgctccatgatggcggcggcctcgatctgtcctggatggtgcttgagcttgtgagtcaggtggtcggtgtactccggcttgccgttcatcacctcgcagaacacggccgagaggacctcggcgaggatggcaagaatgttagcctcaaagagcacggtcgatgcaaggccagagcccacggcagtgccattgaccatggcaaggccttccttgggctgcagctcgaagaagccgccctggatgccagcaatcttgaacgcctcagcggcgttcaccttgctgccatctggtgcaaccgccacggcgttctcgcgcccagtgacaaggccggcaatgtaggacagcgggacgaggtcaccggaggcggtgatcgtgccccggagcggcaggcacggtgtgacgttcgcgttgagcagcttggcgatcgcctcgaggatctcgaaccggatgccggagtatccctggaggagtgtgttgatgcggacgagcattgccgcgcgggttgcctccgccggcaaaacatgaccgtcggtgccagtgccgaacgcgccggcattgaggaatctgccgagaaaacaagcaaatttataattaagaaggcgtccaaagaatttgcacagtaaactgaactaatcgcagtgaccaggtaaacgttactgcttatttggaatcctaatcctcacctgatgagctctctttgcagagcaccaccctccttggtcctcctgtgggacgtggcgccgaaaccggtggtgacaccgtagctgtccgtgccgttcatcatgctgttcatcacccagtcgctgctggccttgacgcgctcgcgggccgactcgtcgagctccaccctggcctcgccggccgcggccaccgcggcgacctgcgcgatcctcaggctagcgccctcgatcttgaccagaggctggcggtactccgccaccatcctcttcacctcgtcgaggtggctccccgtcatctcctccgtggccttcccccagttcagcgggtcggcgcggggcgccgcgacgcagagaccactcatgccattggcagaaacgcggccgttctcgcactccatttcagtaccagaagatggatcggttaacctagcacagaaagcgtcgagagaagagtatataatggttctagctactcgattagctgttgtgaagaagagctagtgtactactgcactggatggtgcggctcttcttggaggggaatggagggggaggcgcggcttaaataggcgggtgggtggcctgcaggacggatgacggaggggggttggtgatggtctggtgatccaaggcgagagcacacggtcaccgcgtcgcggagtaggagagaaaacgggaggtttttgggctctgcggtgtggaagtttcgtgtgcggcgctgtggctgtgtggtggttggtgcgcgcctgcgcggcacggggtgttggtggggtgggggggggggggggggcgcgacggacttgctgcgtctgcggctgcccggtctcccgttcctggctcgtgctcgtcacttcgtcagtcgtcacagtgctgctgcttttggtactcctcgtcctggagagaattgctatgactgactaccactccttttttttatggatggaagtgatccggtttttttggtcaatgtgtatcatttcttttatcaaacgaacgagacatggcttctgcctttagtgccccaaaaaataatgtttgatgagtctaacttctcaggaaataaccggtcaaattttttttttgatagaacaaccggtcaaattttgtaaagctagctgaaacaatttgcaattcagtattcgttgctcggtgcatgccctattcagaatgcatttcgttcaccggggccgggccggcgaagatattcaaaaggtatttactagtttgaacatatcagcgagacctgaatatgattgtgcacacacataagaccacgttccagtcaatgtcgccgaacaagtctctgcttcatttccatacataggtcagtaggcgcgacggccaccatctgagcgtggggggggggggggaacatatcagcgagacctgaatatgattgtgcgcacacataagaccacgttccagtcaatgtcgccgaacaagtctccgcttcatttccatacgtaggtcagtaggcgcgacggccaccatctgagcgtaggggggggggggggggctaatgggcgatcgatcgccaggcgatcgccccaagcgatcagccccccctcccctatactccatacactcttccctcctctcccctcttcctcctccccttcttctcttcctactacagtacaccacacaaaatttttttaaaaaacaaaaagttagaaaaatttatttataaaatattatatatagaaaatttgaattcaaattcaaatttgaatttaaattcaaatttgaatcgggtatgtaaacttttgacctataaactttaggtgtatagactttagatgtatagaattactatatatagaaaatatttgaattcaaattcaaatttgaatcggctatgtaaacttttgacttacaaactttaggtctataaactttagatgcataaaaatactatagaaaatatttgaattcaaatttaaatttgaatcagatataattcaaatttaaatttgaatcgggtatgtaaacttttgacttagaaactttgggtctataaactttagatgtatagaaatactatatataaaaatattgaatttaaattcaaatttgaatcggatataaaaacttttgatttataaacttttggtctctaaactttaatgtgtaaacctaaggtgtataaactttagatgtgtaaacttaaggtatataaactttaggtgcataaatttactaaaataggaaaataatgtggtgtcaaaaaaggaaaccaggtggagggagatagggggagggggatccgcgtcccaggtgatcaatcgccaattaggatttccggccacgcaccaactagctactgctgcgtcttactaatggggcaccactgcagaacaccccagctgagcgtgtcatgttcttatctcatccctttcgttcacgtgattcacatcatgtactaaactaaacatgccggctctcggtcaagtccatgctagcgtccgatcgagtcctcgtcggtcaggcgttctcttgtcagtctcccgcgtctacacactcatctgaagagcagttgccacaaatgtcccatgtggccatgtttaatcccatgcaacagacaaaactgaataattctgcgtctttttctatcttaatctttggcacccttgttcctcgtttgttcagttatcgcacacaggctgtgctctgctccacgtaaacgagagaatggagaatctctgaaacctcgagggtggattttaaactctcgaaggacatcccttattttcatggcacttaaataattataaaaaaattaaaaatatgtatttatatgtgatatatcactttacaaaacacgcaagttaaaatttaacttttaatagttgcaaaataaaataaatttaatttaattttctcattgcaacatgtaaaagttaaattttatcttacatgtttgtgaattgatctatcatatatttatcttgctgaactttttaaaatttttgtgacctctcgagagtttggaatagtttccatgaaatctcatgacttttagtgaacatcacggaccataatttaagaggagggggaaaagagaaggggttgtttgcctgtttggttcagttgttgcccctaactgttccggccgaacacataaaaaattaagaagataggtaaaacaatgagagtcatttgtgtattataatttgattattaaatatttaaaacttaaaaacttaatcaaaataattttgaaagtaacttttctatagaaacatttttaaaaacactccctttattaatttagaaagtgtgtaggtgaaaaaggaggattttttcttcaaattgtgtttgtctcaaatatagcctaaagaaaggaacatccctaaatggaacgttagttggtccatctcatattctcatgtgtcagtgagtgagagaaaccacgagaagaccgggtcgatgcgtttggctagatgaggccgtagcaacaccaagctcgtacaatagtgcatcgctgatgcatccatggaatagatgtgtgatgacgtgtcacatatgacccttgaactgagttgaaatgaactgggatttcagttggcagaagaaatcagagaatgggtttggtggtgtgcattttatgttcgtgtagctgagggggggggggggggagtgtttagatctaaggtgtaaagttttagcgtgtcatatcggttattatgggactttttagtttccgaaattttttttgtgttacatcggatgtcggaaggggtttttgcacataaataaaaaaactaatttcataactcgcctgtaaaccgtgagacgaatcttttgagcctaattaatccgtccttagcacgtgtgtgtttctatagcacttatagctaatcatggacaaattaggctcaaaagattcatctcgcgatttccccctaactgtgcagttagtttttcttttagtctatagttaatgcttcatgtatgtgtaaaaaaattcgttgtgatgtttttgggaaaaaaatttcgggaactaaactaggcctatatatatagtgttgcatggagtgttcgagcactaataaaaaattaattacagaatccgtcagaaaatcatgagacgaatttattaagcctaattaatctgtcattagtaaatgttcactgtagcaccacattgtcaaatcatggaggaattagatttaaaagatttatctcacaaattagtcgcaatctatgtaattagttattttttattttatatttaatattttatgcaggtgttcaaacgtttaatatgacagagtgaaaaattttgaagtgggatttaaacagggcatgagatgcattgccctttaaatatggcgcaagtggcaggccggctggccgggcgaggctgtgataaacagggcccagatagtatgcgagaacgttgtgtccgtgtcaggatggcagcactagttcttcgccacaggttatgtgaagtgtgaagtggtgggcgtctgtacaacctttatcctaaaatgaagaatatgtcacatctcattctaaattgctttgtttagggtggaggaggtatctagagcatgtgtaatgtttgttcctatacaaagtcctataaataggctccacagtaaagatagcaccttgtgaaaaactctgcagtgtataaaaactcttaggaccctttttatttagagaaaaaacatagaaatcttggagcattttaatcctatagaaaaattttatatgaaaccttttgaaacaagtgattgaatcctatcatatccattgaaattactatggaatgaacaatccaatagagattatggagaaaatttagcaagagctctaacctcttggaaatttttctttaagtctatctttctctacgattcttgtatttttcctgtggttcaattaaacggccattacaatattcttcctgtgttttgcaattatctgttttgcacttgcattactattagaatcttacgttttttttctgtttctctatttttttttcatttctactgttcaaagaggcccttagaggtgatatgggtgaaaccactacggttagataaagaatattggactctctctctttcaggaccagacattatattggtactgatctctacgtagacagttgaaaaaacatgtattcccttcgtctcacagagactatattttttatttctgtatccaacgtttgaccatccgtcttatttaaaaatttttaaattaaactaaaaaatagacacatataaagtactattcatattttaacatctaataacaataaaaatactaaacacaaaaaatcaaacgttgtataaaaactgaaaaaataagtttttttagatggagagaatacgttatttaggatgggttctacccatatctctttctctatcctttaggacctctttcaaaccaacattgcatcgagacctggtggttgttgtatcgagatcccgtgactttttagaacttgagccatggccctttttggatttaacaattcaaattagccactactaccataccgaggctagaataacttctttttggctgaagtgatcgtttttttgctaacagtgcgctgaagaataatagatatccattttacatcctgcaatgctagtcacactggcaactgcacatgctatgaatccggtggttggtggcttggtgtgcaattacttcaatgaacaaaaagaagtgttgtgtgcgtcttaaggccgtgtttagttccaaaataatttttcaaactttcaactttttcatcacatcaaaactttcctacacttataaactttcaacttttctgtcacatcgtttcaatttcaaccaaacttctaatttttagtgtgaaataaacacagcctaaaatgttctccagcctgtagcctttgcggaaaaatgttaacctaattaaccggctatataggattgaagccatattatggcatttaactcatgatggctggattgcgagtactcctttctttacgtaaaaaatcaacttctaaaagtatattgagcaattttacagttctttaagagatatcacgagataaaaaaattggatctaaaaaggatatgaaacctttatccggattgtttcctctctttgtgctctcatacgtgttaattatccatagggtttgtaactttagaacttgctttaatctggcttgtattaataagtgttaactgccaaacctaactgaaaaaacaacatgaaagtgaagcagagccgcagcagcaccattttagtatgcacgtgcgcctaattagtcaatagtcattgcatacgtaaccaaaagagagggggggggggggggaagaacaagtgttaggcactagcactactgtgtgactaagtacaacaacgaattcttaaactcctcaccaacccattacgaattggaccacttttttccccaatgcttgagttcaacaaatttaactcaccaacaaacccattttaacattagtcaatagtctcttccaacctttgttagcgactttcaacattgcagggtgcagcttggtagctggatgcatggcgcatgatcagattgtcttcagtcttcaccaagacgccaaccatgaattatgaatataccttgaatgaagaggatgatgcctgcgtgtggttaagagataatattgtgcatgattaatttgtttcgaaatatatataccccctctgtcccatgtctaaaatctatctatctatctatctattatatactaaaagtccattaaacttcctataaacgctcctaggctgtcacgtgttctcctacaaacactcctaagatgccaagtagcattctaaaaatctaaccgttgattttcttttaaattggcgggtccaacattttcaaccattagatcgaataaaaaaataaaatcctcctctctaaaccggtccccacctcctctacgttcccctcctggcctcctccagtaggtatgtacgtactccctctctcccctcatctcctcttccctttcctaatcttcaaattcactaattacatgtcttatttaattctagatacatgttattctatgcgtcatattctttacatcgcaaccaaatataacaacgaaacattttttttatttaaaaaaagttgacatcatatattatatgtcaccttaaataattctacaaatatgtttcgctaaattatatcgatggtatccaagatatagtaaaagtccgtgaaaatttctataaatgcttctaagctgtcacatgatgcttatataaatgctcctataacgccacgtggcactccaataaattagaaaaaatctaagaaaaaaataactagcctttgatttcactaaaattaatagacccatcactccaaaccgttggattagattgatttttctctttcttacgaagagatgtcccctcttcccgtgcatatgcatgtatatacctcctctccgtttctcttttaaggaagttctttttttgcaatcggatgaaattatatggtctatttgtgtcattatgttattatgattaaaatcacaaattagagtttaatacacctgttgactataatttagcttgtaaaaattatgaaaagaaagtgacattatatattgtttcatgctatataataacttcactagaatgtaactaaaatagatctacaatgatagaaaaatgaagtttacaccagtataattttacttgtagaaatatattccctaaagaaacttgtagagatatattaggcgcatttcgacaacttgcatgccatatctatccattatatgctaaaaatccactaaaattcctacaaaatactctcaagccaccacgcgggactcctacgaacactcctaagccaccatatgacactacaataaatcttagaaattctaaagaaatacataatacacctaaccatcgattattttaacttaaacatggtgtacatattattttctactactattaacaatataaaatggaaaagacccacttcccatcccttcacacgtcatgtatgtgttcaagtgacgtctccatacgtaacttatctcttcttctctcccctcacatcctctctttttttaatggacaacattatgtaaaaaacaataattagaaagattaatgattataattctaaaagttgcatattatttttagtttgtttcagttgttgttttatttataactaaataaatagttcaagttccatattatccatatttttatataaatttaaaatacatcatttgaacattgacacctatgctttgcatggaaaccaaataagaatgagacatttcgaagaggttgactatatgcattaattattatgtcctattaaatcagtatacttgataaaaattgattaaacgccccatattgcactcgtaagtaaccatgtatcatgtctcaaaaactagaaatcgatccaacttaactcgatttcattattttcaccaattagatctatttttggaagaaccataagtcaacacatgtcatctatttttagaaaaaacataaggcaacacgtgtcatgtcttacaagttacaaaaaacaataaaagaaatgttgagaaaaaagaaacatctctcattggttttcactaaaatccctccacctccttcatctcacatgtagaaaacactgccctccccttcctcatttttgtagctactaaactggaagagaaacaatcaatgttgaaacaactacaatttttttataagctacatgtctgtcacgccccgaactagtaccgaccggaactagcccgtgacgctccaatttaacctgttaatcgataccagtaccaggaaacagtgctggtatcacaggaagacagattatcacaacaacagaggtctctttattatagagtagaggtacagtcatgttgggctgcggacagatcccgagctcacaactgcattacaaaagggaagcggaagccaggacttggaccaaacaacacaggcgcgacttgggaactaggccgaaaccctaaaactcatcgtagccggcttgctcctggaagaactcctcatcagcaggatccgcttcatcttcttcagcaactggggggggattatttatatagagcaagggtgagtatgggagtactcagcaagccatgggaaataagtgtttaatgcaggcttcaaggaaaggctgttgtttttgcaattgattttatttgaactcttttctaaaaacaactaagtgagtgcttctcaaacgacacggatgggacagtgcgtctcgtctggtcggagtatgtgcaatgtatcagtcttttgaattgattcaaggtaggcacccggccaacagctttcaaacggccacccgggcctagctgatcccatcagctgcaggttttccaaacatcgatcccctttccacaacagcaatttcacaagcagtagtcaaacaaaactacgctaggaatcacctcacatccgcccatgaccgtgggcacggctgttcgaacagtttgttaacctctgcagagggggtacactttacccacacgacattactaacccggatcacctagcccgtggggatcagccacgttgggagacctccaagctttcatgacaaggcatttccaaagccgacacaggtttaccatatgccgacgagaggggtcccagaccaacaacaggttaggtcccagaccatactgtgccaggaagcccaggggtcctccccgacactaccccggcgaatccacatgtctctcggcatcaaggctcccctgataagctagttactcagccaggggtgtcccattccacccatgtggtcgtacttgtcttatgttcggatgaaatttcaaggaaacggtccttaggtgcaagagcgggaaaccgtacacccggtacgttccccggtccgcggttttggaaattcatttagttcgcaagcaccgacccaggtgtcgggttttccaagtcttttgtaaaacccaagttttacccaagatgtttttcagattttaagtttgaaggcgaccgtcgatactcgcacagggtgcacgaatatcgaggcgcaactagatggttacaaggggacatgatataacaattaacaaaggaaggatcaaatgtaacaaattaggtaggtccgccaatttgccttgcagacgggacaaacagattaagtgcgatcctatcaatgcataatatttttcaagtaacataattaaattcaaatataggctcaagatgttcaaaggtggcttgccttgctcgagatctggagcttgatcctcgaaatcttcgcactgcgggtcttcgggctccgaaactacgcgcaaaacgggacaactcaacaaacggcgaaaataaagccctattaatgacctctaagcgtgccattagatagatcttgagatttgaggaattttggaagttgaacggagtcaaacggatttacggttgggaagatattgaatttctaagattattggatttttggtctaaaggaaaaggatttaattaaatccttttggaaaagaaaagaaaagaaaagaaaagagggagggaaattagacttctctcgggcggctagggcgcggcccgagagaaaaggggcggctcggccgagctaaatgggccggccggcccaacaaggcggcctaaggcacgcgcgcgcgggaggggaggagagagagagccggtggaccgggctcacctcgcgtggtcccgagtgggacccgcttgtcagcggctcggctcaccgtgcggagggagcacgcggcgcggcgctaggatgggggagggacgcggtgcatgcgcgcagttcgcggtggacgcgaatgcggcgggcccacgcgtagcctcacggctcgcggtggaacgcgcacacggggaggggctgaccggggtcggctcgacccggtcttggccgagctagcgccgacgtggcgcctacgtggctgccacgcgggccggcgggaggtagacgacgacgccggccggaacggacggcggacgacagcggcgagcggcggagagaaccacggcgatacaggtgaaagcgagcacaccgggtggttgcacaggacgaggggagacgagccaacggctcggattcgccggagggagcacgggaggcggcggcaatggcgtggaggccaacggctcctccgacacgcgcaacgacgaacggcgacggcgaacagagcacgggaggcggcggcaatggcgtggaggcgaatgggagaggaaaggaaagggggaagcttgggtttataggggcgacaatgtcggtttgggaagcgacctaaggtggtcaaaggagagggctagcgctcggcggtcgcggccaaagcggcgacagggaggagggaggaggatgacgctggcgggaggaaaaaggggaaaagagggagagaaaagggggcttgtcccttgcctctttgggaaaaggaggagggagcaggggcgacgcggcagagggaggaggagctctgcctctgtcccttggcagcttgcgcgcggagtggcgggggccgggcgatgacgacggcgatgacggcggggcggtttggagcagggcgacgacatgggcggcaggcgcgggcaggcgcggcagaggcggcgaccacgcggctctcgcgcacgcgtgggcagagcgagggaggggcgctcggcgcggctctcgcgcacgcgcgcgcggcgcgcgggcagagcggaggagggagggagagagagagagagagcgccggggagggagggggagatgggccgagagagattcggcccatcgaacctgggggaggcaaaatagacttttgcggaggaattgatttgggaaggatttggattcgggattgaactcgacgatagatcggggatttgagatctgagatggcacggacactagacaacaagcaaagaaacagatttcgcaaatagagtttttaagagatagttttcccgctaggcgccacgacggaacgggcgctacaatgtctgatttctatctaattattctctatttataattaaactaacaatgtaatatttatatatgcatatattttgccgtataagaattatagcatttgggcacagtcaacccatgcactatgcaccacatctaaatacattaaaattttgacaataaattttatgtcattatgaaaaattctacaagcatgcatagctaaattaaatcaatagtatcggaacaaaattttcgtctttaatttgccaaaagaaaaagaaataactcaacaacacagagtcacaccatgaaacatatatagctaaattaagcgtacacttcgtaaacaagaataactaactgaaacatgaatcgtaaaagccgctgcataaaacatcgagttcctttagttagagaaaatagtccaattacttaatttttttttctaaatgtgctcaaataatccaaataaacaaaatgatcttttataagttccaattaatatttcaccattataagttctcaaacacagtctacaatgcatgtccacgtggatgcatgtcacgtcccaaaacgaccctaaaaaatatcctttaaattatgcctagaataattaaaatctgagtgaaagcctccaaaaattaaaatgtgcaaagttaaaagtcaattaaggctaggaggatttttgtatatttcctaaaagcctaaaatgtgtaaataaattttagtggaattttcagagcacaaataataattaccaagaaataaacaaagttaaaaatgttttataaaaagaaaaaccctaaaaatcctccttccctcactctgggccgaatccggcccatctccctcccccactctctcctctccccccgcgcgcgccgctgacgggcgggcccacccgccaccctcgctgacgggtggggcccacccatcatccccttcctcccgccgctcccgccgctccgcccgcgcctagcgccgccgccgccgcgaatcccgccgcccccgaccgttcccgcgtgcaattaagtgggggggaaatattcaccgtgattccctctcccttcccccccattttcctctctctctctctctatttcggatggaaaccccccctaatcccgccggcgccattaatggcggccgggcctcccacgccggtttccttccccgcgggccgccctctctcactcccaaccctatataaaccctccccgagctccccaccaccgtttccgccactcgccgccctttctccacgccggaatcgagctcgcgccgtcgtcctctctctccgccgtcgccgtcgacctccggccgggcctatccgcttgccgggaccgttccccgcctcggcgtcatctcctccggcttcgccgcaccgccgccgaccccgtccaccgtctcgccgagctcgccgaccgccggaacgccgccgtccccgtcaacccgagccgcgccaccgcctccctccactctagcctcctcctccgtcacccccgtcgacccggggtgagccgtggaccgccgcctctttcccccttcccttcccctctcttggccgctgctccgccgtgcctatggccgccgccggcgaccataggggtgcaggcgccgcctcccgccggccgcgccgatgtggccgcctccgggcgcgccgtgtggccgccgcgtggggcccggccgtcagccgcccgtgcctccgggtgcggctgacgcgtggggcccacggtgccggttggtgagcccgtgggtgcacccggtccaccgtggaccgagaggctgccgcgtggggcccaccactcccgtggacccggcccgcgcgccccctcccctcagctgacgcaataaaccctatttttaattaaaatttaaatgaagaaattcgcaaatattcacttaaagagcatataaacttcaaatggccataacttggtcgtttgaactcggaattggaccgttcaagtctctaatttttccttaagaagtcaagaacccatttttgtgctttgttcctgcttgttatatggagtttattagagtaaaagcctttttcttcccgttggtcgtgtagacgctgcagcttcggaagatccgctctacgtggaggttgaagccgacgtttgggaaagtgagcaaggcaagtcacatcatccttgaacatattgaatcccagtttataaaattattttgatttaaattaatgcattatcgctttatttaaattcccgcgttatcactgttttatttagccatgcctatttacctttgttatgaccttattattattgctattgttattattaccttgttcaccctaggaaaataaaacccaaactagtgggtactctattcatggttccacttgtatgaatttaggtagatgcttcgctgattaattagacaaacattaggtggtttcataaccttagactttgggaatgctcatatcatttggacattatggaatgattggactatgtggaaatggacacacacctccccctctattcaaaacccttaaaatggttttaggctgggctcggggtgcatggttttgatagtagcacctcggccaccataaggaccggtcttcgggcctctgttgcaaagcactaccgtacttccacatgtctagtgggtaaggcttagtttgtggctcaatctggttataaacaaaggtacacggatggagatggacgaagtcggggctcgatggacatctctaggacaaatgaaggctacacgagctgcggctcggtagtcgagatgtcatggcacagggccggtgttctgctgctaggggctcaatcctgcctacctgtctcgagggttccggccgtaggcggggttgggtcagtactcttgtttatggctaggatgggttgggaactatgtcacgtctttcgtccgtatgccgtggtggtatgtggcacatggttacacgtgaggaagatgtgtcttgtgggtaaacatgtacacctctgatcagagtaaatgtagcgcccgttccgtcgtggcgcctagcaggaaaactatctcttaaaaaccctatttgcgaaatctatttctttgcttgttgtctagtgtccgtgccttctcagatctcaaatccccgatctatcgtcgagttcaatcccgaatccaaatccttcccgaaagtccctccgcaaaagtctatttcgcctcccccgggttggatgggccgaatctctctcggcccatcttcccctccctccccggctctctctctctctctttccctctctctctccgctctgcccgcgcgtgcgcgtgagccgcgccgcgccgagcgcctccccctcgctctccctctccccgcctccatccctggcgagctccccgcccgcgaaataggccccgcgcgccgttgttcgtgtgcgcgcgcccgtgtggtcgccgcccgtgtcgcgcctgcgccgtatgcgccgcccggccccgctgccctgccgcgcctgcagccgcgtagccgctcggccccgcaagccagcgcgcgtgcccgagccgcgccgctcaaatcgccgcgccgcccgttgcttcccgcgcgcgcgtgccgtggtggccgaccgccaggtcgctgccgccgtcagcctctgccgcgtctgcccgcgcctgtcgcccgtgtcgccgctccgctccacaccgcccccgccgtcatcgtcgtcgtcatcgcccggcccccgccactccacgcgctagcctccaagggacggaggcagagctcctcctccctctgccgcgtcgcccccgctcccctcctccttttcccaaagaggcaagggacaagccccctccaaatctccctcgttttcgtctctcgccaccactatcgccctgttcgccgtcgccgttcgtcgttgtgcgtgtcggaagagccggcacgagcaaggacgcggaaggggacttcggccacgccctcttcctcctcttcctcggcccgaggccgagacgatcacgtttcgcgctgtcggctctcgtcactgcgcccgcccgcacggtagtgcctccctccgttcttcctcctcgttccatctcctccccttagactcgggtagtagcacgagtagcctccccgtagctagccggcgccgccccgaccgttgccaccgctcgccatgtgctcgccgccgtcgccgcccgagctcggaagcgcctctcgtcgccggcctccttcgatgcgtttcctcctaatccaacgctagcatcggattcccgtagccgcgtagatgctctcgccgccgggaatcggcccctcgtgacctcgtcgtcgtttcccccttcttcctccgccggttgccgccgctgcaattcgccgccgtcaagctccctccggcgaattcgagccgttggctcgtctcccctcgtctcgtgaaaccacccggtgtgctcgctttcgcctgtatcgccgtggttcgctccgccgctcgccgctgtcgtccgccgtccgttccggccggcgtcgtcgcctacctcccgccggcccgcgtggcagccacgtaggcgccagctcggccaagaccgggtcgagccgaccccggtcagccgctccctccggccccgctcgcgggcgcggtccaccgcgagccgtgaggctgcgcgtgggcacgccgcatccgcgtcctccgcgaaccgcgcgcatgcaccgcgtcccttccccaaaccctagcgcacgccgcatactccctccgcacggtgagccgagccgctgataagcgggtcctacccgggaccacgcgaggtgagcccggtccaccggctccctctctcctcccctcccgcgcgcgctctgggccgccttttgggccggccgggccattaagctcggccgagccgccccttttctctcgggccgcgccctagccgcccgaggaaagtctattttccctccctcttttcttttcttttcttttctttttcaaaaaggatttaattaaatccttttcctttagaccaaaaatccaataatcttagaaattcaatatcttcccaaccgtaagtccgtttgactccgttcaacttccaaaattcctcaaatctcgagatctatctaatggcatgcttagaggtcattaatagggctttattttcgccgtttgttgagttgtcccgttttgcgtatagtttcggagcccgaagacccgcagtgcgaggattttgaggatcaagctccagatctcgagcaaggcaagccacctttgaacatcttgagcctatattggaatttaattatgttgcttgaaaaatattatgcattgataggatcgcacttaatctgtttgtcccgtctgcaaggcagattggtggacctacctaatttgttgcatgtgatccttcctttgttaattgttatatcatgtccccttgtaaccatctagttgcgcctcgatattcgtgcaccctgtgcgagtatcgacggtcgccttcaaacttaaaatctgaaaaacttcttgggtaaaacttgggttttacaaaaggcttggaaaacccgacacctgggtcgatgcttgcgaactaaatgaatttccaaaaccgcggaccggggaacgtaccgggtgtacggtttcccgctcttgcacttaaggaccgtttccttggaatttcatcagaacataagacaagtacgaccacatgggtggaatgggacacccctggctgagtaactagcttatcaggggagccttgatgccgagagacatgtggattcgccggggtggtgtcggggaggacccctgggcttcctggcacagtatggtctgggacctaacctgttgttggtctgggacccctctcgtcggcatatggtaaacctgtgtcggctttggaaatgccttgtcatgaaagcttggaggtctcccgacgtggctgatccccacgggctgggtgatccgggttagtaatgtcgtgtgggtaaagtgtaccccctctgcagaggtcaacaaactgtttgaacagccgtgcccacggtcatgggcggatgtgaggtgattcctagcgtagttttgtttgactactgccttgtgaaattgctgttgtgaaaaggggatcgttgtttggaaaatctgcagctgatgggatcagctaggcccgggtggccgtttgaaagttgttggcccgggtggccgtttgaaagttgttggccgggtgccaatcttgatcaattttaaagactgatacattgcacatactccgaccggacgagacgcactgtctcatccgtgtcgtttgagaagcactcacttagttgtttttagaaaagagttcaaataaaatcaatttcaaaaacaacagccctttctttgaagcctgcattaaacacttatttcccatggcttgctgaatactcccgtactcacccttgctctatataaataatcccccccagttgctgaagaagatgaagcggatcctgctgacgaggagttcttccaggagcaaaccggctacgatgagttttagggtttcggcctagttcccaagtcgcgcctgtgttgtttggtctaagtcttggcttccgcttcccttttgtaatgcagttgtgagctcgggatctgtccgcagcccgacttgattgtactcctactctataataaagagacctctgttgctgtgataatctgtcttcctgtgataccagcactgtttcctgggactggtatcgattaataggttaatttggagcgtcacgggctagttccggtcaggactagttcggggcgtgacagtaaatctattcgaatagccgcgccctcggttatgggcaagcctagcaatgtatccaagttagtgttttaaattcttaaaacctacttaacaattaaaatgtggaaggttggcctgggttggctttggacgagctgtgacctgggtctagttgccacttcggtctgaatcattgtaggccttgggttaaggcaggtttgtgcgggttcacggccttgattaataatattgtgtagctctaggatcatgtttacaaaatggccctgagcaactaaaagtcttttaaatgctgtttactgcgaaccctaatcccctttattataactcccttgtactcctttgcatttattctgcatccgtgggtgtgtcttgctgagtactgtggttgtactcaaccttgctcaatttttcctcaacccagaagaggagttcctggaagatgaaggctttggtgtctagctcgtgcctgccgtcaagtgcctgtggtcgtcgccctagtcttccgctgttttccgtttatcttcgtgtgtgcttggccttcgccgcccatataataaattatctatttacgcttccgcttgttaatctctgaattgtaacaacttttggtgtactttgcctcctgggataaggaataatacacgcatgaatggaatgcctgttgggttaattccggtcgtgacaatgcatgggttatcttgctagttttagaaaatttcataaaaaaactgtaaaatgtggtatagctactccgtttacaaatgcagctttaaggaagtgcaccggacgcggttccttgtggttggtgaggcaggtataaaatccgaattgaaacatgtgtaatccagtattggcaatgccactattttattttctggccattgatgctagcagtggagaagattaaacaattaagtactacctcagttccaaaaaaaatgcatttctagctttaaggctttgtcccacaaaaattatatttctagccatgtggaacccaacaaattgattcatctagataagtttccttaagttctctcagcttgtaatttaagtatgctaattatatgggttaattctgttaaacttccttttaatcatttgtatatatggaatatgtgcatgcaatgggtacattaaataaggtcattgtggtcattttctaatcctactgtttggtcctaaattaattagaaatgtaatttttatgggacggagggagtactacctactcccggtggctttcctttcctggcagcctccgataaagtgtcataaattggaggtcggcaaacaatgtttaaattataaaaagctggacacatcgcaagagttaatctaaaatcttatatctgttctcgcgaacccacatattcattattcaaagcgaattaactctttcaaggacattgttcacatgatcacgttccaaaagggcgtagtagtaaacacattgctcacgcttgcgtcattgcctgtcaagtggcttggctacgtacatactccgtggtggtaggtgagagtgtgattgtaagtgcgaagttcaccgacccaaaaaactatagaccatacctttgtagtaggtggcactgttttttttttctcgtttttttccccaaccccaaaatgaatttgattcacttttatgaagcgagccaatgcaagtatccacgatcgagacgttcccgttgcaaaattttctatctgtcctcaccaaaccgcagatatcaacgatgggaaattcagaattcgtgcaactgatttatcgttgcgaactcgatcgtcaatgttacgtaagttctacggagtactagtgcgatccgatacatgacaagtattcaatcgataccgatcgaacacagggtctgggtctatggcaaccattacagactatatgcaaaagtaaaaaaaaaaagaagtaaaactcagagaacaaattttcagagcaaagatgcactgaacaaccgtgctctctgttcgtccaaacgtactaacggtgagatatgccgacattcgagaatgcgtggagacaaataatcatcccaagtggccaagtactactccacacctcattcttttctgattaaaatacggattttatctcattttctactagcactattctaaagatatatttcgtaccaaaaaaatttacataaaatattgttttaaatatcagataaatccaatctattatataattaaacgaatagaaaaaggagcctccacgttcgctctcatagtctagaaactctcacattaatcggagaaaaagaaaaatcagagtccatatagaaatataatttagaaatacctgaaattcagaattaaaaaataagaaatattagaagaggaaactagagtccatatagaaatacaatttagaaatagttgaaattcggaattaaaaaagaagaaatattagaagaggagtctagagtccatatagaaatacaattaggaaataactgaaatttggaattaaaaataaggaatattagaagtagagtatagagtctatatagaaatacaattaggaaataactaaaattcagaattaaaaataaggaacataagaattagagtatagagtccatatagaaatacaattaggaaataatacaaatttggaattaaaaataaagaatattagaagtagagtatagagtccatatagaaatacaattaagaaaaaaatagaaattcagaattaaaaaataaggaatattagaaatagagtatagagtccatataggaatttaaaactaactaaaatttggaataaacataataaaattaaaagtacatatattattaaaggaatagaaaaaggagcctccacgttcgctctcatggcctagaaattctcatattaatcggagaaaaagaaaaaacagagtccatatagaaatacaatttagaaatagctgaaattcggaattaaaaaaaaagaaatattagaagaggagactagagtccatatagaaatacaatttagaaatagctgcaatacagaattaaaaaataaggaatattagaagaggagactagagtccatgtagaaacacaattaggaaataacttaaattcagaattaaaaataaggaatattagaagtagagtatagagtccatatagaaatacaattaggaaataatagaaattcggaattaaaaataaggaatattagaagtagagtatagagtccatatagaaatacaattaggaaataatataaattcgaaattaaaaaataaggaatattagaagtagagtatagagttcatataggaatttaaaactaactaaaatttggaacaaacataataaaattaaaagtatatatattattaaaggaatagaaaaaggagcctccacgttcgctctcatggcctagaaattctcacattaataggagaaaagaaaaaacagagtctatatagaaatacaatttagaaatagctgaaattcggaattaaaaaataagaaatattagaagaggagagtagagtccatatagaaatacaatttaaaaatagctgaaattcggaattaaaaaataaggaatattagaataggagactagagtccatatagaaacacaattaggaaataactgaaattcggaattaaaaataaggaatattagaagtagagtatagagtccatatagaaatacaattaggaaataatagaaattcagaattaaaaataaggaatattagaagtagagtatagagtccatatagaaatacaattaggaaataatataaattcagaattaaaaaataaggaatattagaagtagagtatagagttcatataggaatttaaaactaactaaaatttggaacaaacataataaaattaaaagtagagtttagagtccgtataaaaatacaatttgcaaataactaaaatttgaaattaagaaaaacatgggaagaagagtttaaagttaatatatgtcgacgggtgatacccgtagaccggatatagagggtattggggtacgttggtacaaaggtccacgtaatacgacatcaagcaaacaaaagacgaagattatactggttcaggccccttgataggtaatagccctaatccagttaatgtgggactatatgatggaaaacacaggttacaaagggaacaatagaactcgatgaatccgacgagatcgtagtcgagttggttcgactagatctccggcgatttggctcctgcaggctccgacttcgtaggctgtgggggttgtgttggctctgagattcgatgccttaggtccttcccggggggtcccttttatatcgcaggtcagacggtttccaagtagaactcggagacatcagaccctacacgatacattgacgacccagtcttgtccgagtaggactctttccatccgtaaactccgtgaaggatttccttagtgcatgcagagagtatccgtatgctcgtgggtatgccataccgatatatgatgtatatcggagggtaaagggtatgcctaacccgtaaccctaacagtagcccccgacttctgtttaaatgaactcgtgtaaccattcgtgacttcttgtgttgaggctattgtcgttcccggtgtgagaaccgtagagacaggacgtagtcgagaacaccatgtgaagcccaacggttacgagtgaatttaaactgaagtccaaaaaactgccgcgcgtaacggacccagaaatttccggcggctatctctctcctttccttggaattcgcaccgtcggtagtgcgtctatttaaaggaattttggggatccattttgaagtctgcctattgtgaagaaaacctcccgcctgcaagcgttcttcgtcttcttcgctcccacaagaaaccctagctagtcgacctcaaccctttctccggcgatctccgatcggcgatggatctcggcaaatcatcctccactagcgcatcactgaagaagcttcaggaggacggcgcccttcccggtcgtggaaccatggaaagggaagcaggaggtactgaaccccagcctgtcttaggtcgcatggttgcgatcgaggactacattctctgcggttttctccctccaccttccaaatttcttctcttagttttgagcttctatggtctttctttgctccatctgaaccccaattctatagccttccttagtattttttcacatctttgtgaggcctacattggggtagagccctttctcgatctctttcgcttctactacgagttgcattggatggaatccaacagggtatctggatgcgttggattccgacttcgggatggcctaaagtcgcgttatatccccttccagtgtgcctcctctcgcagcaaatggcggacgaggtggttctaccttcagatagaagattcggatcctgtcttcgttgttcctgaggaacaaccagacaagatttcgtattggaccgcaaaaccccctttgaccccttctcttcagtcattcatcgatgttgttgacgatctccaagtacgaggtttgtcgaggtatgaagtcgctgctgacttcattggtagacggatccagccgctccaggctcgagcccacccagcctttgactattctggaccggaggacgcgacccgggtttctcctcggggcatctttctcgcatttatcctgatatgcttgtgtgcgcgttcctcctggctcatcgaaatttggttctcgattcacaggtctgagcagcgaagccatgggacgtcgtgtcggccaggtcatgatcagtggcccgacgacggcgggtaatgtccccgttcccctttgcgagaagggggtggccgaacgcgatgcagccatcaatgtaagtgtactcagtagtcattctgcgtttttcttctgagatcgctttgtgactttataaagcgtaggctcttcctctgactgacatcatcgggccgctcgcggaccatcaggtggcggcgtcactgaaagagaaggtcgccaaggaggcatccgatgctgctactgccgctgccaccataagtggtggcaatgttccaacaaaggggaggaagttctcctctgtaagtggacatcgtcgcaaggcatctaccccctcggtaagctatcctgttgtttgatcacacagccagaacacttttgccttacttcgcatcaactgttctccaggcctcggacgcgtctcccccacctccacgacgacagcgatttgtgacacttggcgagaagtaagtggatgaatttaagttttcgcgattttgttcgagcgttgtctgaaccatagccatctcatagggtggcgcgggcgaaggcggtgcaggacgagtctggagggacttccggcgcgtctcccgctgtagcctcaacggatgtcgtgcttgcgcccaggagccgcgaggtgacgccaagcggcccagccagcgatcccgcggctggtcgtggtccaccggctgccgtcctcacctaggaggagctccaggtcgaaatggggcgtctcctcgaggctggtgctcgcggcattggtcgcgagattgcggaggcgaggtcggcggcggtgtcgacaaacgagcgcgccgaccggctggcacacgagttggcggaagctcgtgaagacctcaagaagatgggggagttggtggccggcaacgagcgacaacggcaagggctcgagcaccgtatgtcggagctcgggaacaatttgtcggaaatccgtggctcgttgcgggtcacctatactggtctgcaccagctcgccggggagtgcggcatcaagtctaccatcccggcgaatcccgatgagttctcgctgagatcttctcttgcggagctagcggcggcgatggaggagattccctccaagcatgtggcccggatcgaagaggagacgtccaacgggatctacaccggggcgtgccacgtccttgcgtgtgtgaggctggcgcatcctgaactcgatctgcgcgagatcttggatcagggggcggctagcggcacgcgtaaggaggtgatggaagaagtcggcgacctggggggaatctgttctccccctttttgaagagtaggatctcttgtactccttagatatgctgtgtaaaacatcaatgggtttgaaccgcctttgtgcgtgtagtcattaccctagctttattttgatcttgagtactttttgtcccttgtagagatgttgatgacgaggatgtccagcagcgtgggtagcctgagtcactggcgatcattccagctcttgcgtttgaaccacatgcgtcgccggacaatgtaggccagatcctagccacggggacggagatggcgacgacttccttaggttagtggtcccttcatccctttttgctcctccgactaggtcagccgtgttctcgaaagagaagtgaagcttgacttagttattcccacattgaacagatctcgagagtgctcttgctgggcaagatcgtcgtatccaatattggaagacgaaatttgaagtagcagaactcgagagaaccatgctggcagtaaagaaggagcaagctgtggaaatgctccgaggtcgtgaggtgtggttcaactcgtacttcaagagttgctgcacgtccatggccaaggtctgtagagagctccgagtaccccgtggggatcccgaggagtcggcggccggatatatctcgtggctgaacggggcctgtgctcagctcgaaggcgtcggcaagggcatcgacgaagccttgaagcaggagtgtcatcgatcgagccgataagccggagggcacgtgttggcctgcctacgagatcatcgcccgcgactggaccttgattttctccgtgaaggttttgctcgttctcggaggactccggcggagatagaccacctagcgaagtcgatggcgccgttggcggagaaggtcttccaatctatggactggcattggccttcttggtagtctttgtaccctgtgatagatatcttagggaaaagtgtaatatagccttagacttgtgtaagaattgtaaggagtattttgtgaaatagaaaagaaatctatcttaacaaatctttcttactccggatatcgtgtgtaagagtgtgttctcagttcacgactttagtcggtcgtttgagtcgtacactctccctagcccccggccttgtcgtcggaggagttttctcggaggataaggctcttgaacctttgacatgccttggttgaataaacactgatcctagcccctagccgtgaagttggaaaattgatttccgattacacggcttggttaatacgtacggcgagaactcttacacgaccaggttttacatggtctttcgtctctacaggatctaacaaggccttgtcggctctgggcgtccccagccaaagatcccttaggttcctcggaggccttgtcaagacggcgtaaacggacatgaggataggtttcaacgctaggtgttatctgggtaagggatcctcgggcaggaacactttgattgtaatatgcgcctaagaataggctttcttgatgctgtaagatgtcttataggtatggatgatattgactcatacatagaatttacgtagttggtcaatgttccaagaatttgccaactcgcgaccgtcaccgtttgcaattttgaatgcgcctggccgcaagacttgtgtgatcgtgtaaggtccttcctatttgggtgagatcttgtttcgccctgcttggctttgaacccgtcggaggacgtagtcgccgatcaaaagtatgcgtgctcggatgcgcttctcgtggtaccggcggagggcctgttggtaattggctgctgagacggcaactcgttcctcgagtagattcacatcgacgtttcgctgctcctcctgatccttgtcggaatgcttctgtaatcgtgtactctgatgtcgtagctcactggggagcatggcctcggagccgtacacgaggaagaagggtgtttccttgttagacgttgtcggtgtggtgcgtacagcccatagtactgatgggagttcttcgacccattttttgtcatgtgacatgagcctgtcatagacgcgggttttaatcccttgtagtacaatgccgtttgccctttcgacttgtccgttgctttgagggtgagagaccgaggcgaagcatatcttgactcccagcccgatacagtaatcctagaaatcgcgctgatgaactaggagccgttgtcggttatgatgcggtgcggtagtccgtatctgcaaaatatccccttgatgaatttgatggcgttgtcggccttgatttcccccatggatactgcttcgatccacttagtaaatttgtcgatcgccacgaataggaacctgtagccaccccgtcctcgtgggaatggcccgagtatatctagcccccagcatgagaacgaccaagtaagagggatagtcgggagtgcttgcgcgggtagctttgtgtgtttactgtggaattgacaagcttcacattgctggaccatgtcgcatgcatctttgagggcggttggccagaaaaacccctgtcgaaaagctttcccgaccaatgtccgactggtggcgtgtgacccacagatgccttcatgtatatcaaggaggaggtgtctgccgtcgtcggacgagacgcatttgagaagtaccccgtttggtgctttcttgtatagatcgttgctgaccatacagtagatttttgctttacgagttattttctcggcctctgtatcgtcctcgggcagctcctcgctgttgatgaatttgattagtgggatgcgccagtcatctgtggtctcgatatcggcaacggcgcgttctgcctttgtggcctccgagccaatgtcgggggtggccgggctaacttcgccgctaacctcttttactgatggcttcgtcaggatgtctagaaaagtgtcgggttcgagcggttctcgtctggacgcacgtcgtgctaggtcatctagctcgatgttgtccttgcggtaaacgtgtcggacctcgatcccatcgaaccttttctctaacttcctgacttttgcgagatacttggataactcgaggttagagcatttataatctttgtgcacctggttcgtgactagctcggagtctcctttcacgattagtcgtttgaccccaagtgcggctgcagctcttatcccggtgagtagtccctcgtattcgactgtgttattggtcgccctgaagttgaggtggattgcgtgcttgaattgatctccggaaggagacgtcaagataaatcctgcccctgctccttggctgttgagtgcaccatcgaacgccattgtctacgtttcgttatcgacttggttgtctgatttattatcaggcatagtccaatcggctacgaagtcggtgagaacctgggacttgatggctgttcatggcacaaagtggacatcaaactggctcagctcgactacccatttcgcaatgcggccgacaacgtgtttgtttctcacaacttcaccgagcgggaaggaggagacaactgtgactctgtgggcttgaaagtagtggcgtagcttccttgatgtcatgatgaccgcataaagcagcttttggatctgtggatatcttgtctttgcgtcatggagagcttcgctgacgtaatagactggtcgttgtactttctctctctcgacaacaatgacggtgctaacggaatatggcgtggcggcaatatagaggaataattcttcattaggttggggagcaacaagtacaggggggtttgataggtagcgcttgagtgcaacgaatgcctcttcggcttcctgtgtccattgaaatttgtcttgtttcttcagcagagcgaagaaaggttgccctcattctcccatcctagcgacgaacctgctcagtgctgccatgcatccggttagcttttgtacttccttgagtcttgtgggcgacttcatgttctcgatcgccttgatcttctcgggatttgcttcaattcctctgccagagacaaggaatccgagcagcttgcccgacggtactccgaacgtgcacttctctggattgagcatgaggcgatatcgtcggaggttgtcgaacgtttcccgcagatcgtcaatcaatgagtcgcttgtcttggtcttgacaacaatgtcgtcgacgtatgcctcgacattgttgccgagctggtcgctaagtgcgccctggaccgtgtgctggaaagtattccctgtggttatcagtccgaactgcatcttaacatagcaaaataccccgagtggcgtgatgaatgctgtcttctcttcgtcctcttttgccatgctgatttggtggtagccagagtaagcgtcgagaaagctcaacagctcacagccggctgttgaatccaccagttgatctattcgaggaagagggaagtgatccttggacacgccgtgttgaggtcggtgaagtcgacgcacattctccatttcccgttggccttctccttggaagttggcgacgaactgctgccacaggtctgcccacgaagagatcgagtagggcgggagatgcatcagccatgaatgtgcagagccttttaacgcaattggcaaataattcgccaatgcgttgtcgtctgctccggcagtgtagagtactatggagtagacttgaaggaactcttctgggtcggtgcttccatcgtactttctattgctccgggtcggaatctctcaggccatcggacatcacgcagggaacgactgaaagctctacacccagcgctgggggcggtgggttgtcggcgatcgtgtgtccttcgtggatgtctgtctgatgatgaggaagacgaggatgatgacgatgacgatgggtcgcttggttccggcgtacgattacgaggatgtcggcctagctctcgagaatcctgtcgtcgtctcccgctgttgtctcggcgtcggtctccatcatcgtcgtcattatggcgacgtcctcgaccagtatcgcctggcacccaccgttcgcgatcgttgtgatcgtggcggttgtggcggttatcacggtctcggtcttcgtttgaacggtctcctcgatcttcgttatcatgacgctgtgaagagacatgacgccgggaacggttctcgttgtctcgtgcgcgtcgtgcctctcggcggccgttgaggtgatcgcggagatcgccagtgccgcgaggtggaggggtggctcgatgaggcgattccctccgttcagggttttcaccattggcatcaccagttggtggttgttctgggtgcgctgcggcagcggcctcttcgaacgcgttgctgaggttggtcactgattcccgtagtcgttctatccaacgcgcgagatcgtcgttgagaacgggatcgtaggaggtttccctcagtatagcgttgacggctctgatgtgctgggccggagtggccacttgattctccgcttctgcattggtgcgcgctgacgtgccgacatcatcgatagccaatacctcccgtggcgcgctcgttgtcgatgatccatagtcttcgaggaggtgcaagactgatggttcgtggggatcgatgtcgattaccccaacaaatcgatctgaagttggcgtcgctcctcgttccttgtctttatccctaatggggatgtgattgttggaccttaggagatggcgccttcatggcactgagaaagaccttgcagcttgagaggtcgtgattctttgtcttatggataggacaatagacatcacgagttggagaaatacgctgaattccacgctctttgcaggcgcgaatttcagcgcggacgttgagaaaaacccagcaggcttgcaaagtgtgtttcctggttttgtggataggacaccaggaccttgtcgcttcggaagtcatcctcgtcggctcgtggttcttgtcggaatgacaaggtttggccgcattagaatccttctcgagttcggatgtcgtcgatgttccgttctccgcctcgacaggaggatctttcgacatggagccgtcttggtttgtagccactgcgttctcatttccggtcattgatggactggctgagatcggcatcgtggtgtaaactgggaagacgatttcaccgactttgagtccacactagcattgttgaagcacggaatacttggttgaggttggtgttgacgctgttgtcgacgaagctggatgacatagtagtataaccttgagcaccaagtgcccctacctggcgcgccactgtcgacgggtgatacccgtagaccggatatagagggtattggggtacgttggtacaagggtccacgtaatacgacatcaagcaaacaaaagacgaagattatactagttcaggccccttgataggtaatagccctaatccagttgatgtgggattatatgatggaaaacacaggttacaaagggaacaatggaactcgatgaatccggcaagatcgtagtcgagttagttcgactagatccccggcgatttggctcctacaggctccgacttcgtaggctgtgggggttgtgttggctctgagattcgatgccttaggtcctccccgggggtcccttttatatcgcaggtcaggcggtttccaagttggactcggagacatcagaccctacagtcttgtccgagtaggactctttccatccgtaaactccgtgaaggattttcttagtgcatgcagagagtatttgtatgcgcgtgggtatgccatactgatatatgacgtatatcgaagggtaaagggtatgcctaacccgtaaccctgacaatatagaaatacaatttagaagtaactgaaattcgaaattaaagattaaagaatattgaaatatgagtttagagttcacatagaaatacaattaaaaataataaaaatttagaaataaaaataaataatattggaagaagagcatagagtctatacagaaatacaatttacaaaaaaataaatattaaaatacgagtctagagtacatatagtaatatatataatttacaaataactaaaatttgatattaaaaataattaataactaacacgtatataaaatataatatgaatattacatattagtagttttgtaaaggtattgcaaaatttaaaattatgttgccattttaatatatttgaataatataatgagaaaatatatatgctattatataagggaaaatataataatgctagccgcgcaatatgcgcgggccaccatgctagttaataatatgttaataaccttttcgttttataagtatgtcctaactttatcttcatcttttttaaatgaaaacgaacaacacataatggtaatgcaggatgcaatggcgacatctgaaaacgcagttcgattggacgctaagctagcgctggcggtgacttggcccttacatccgcggccaaagcgcgcatggacaagttgcaacttgcaactcaccagcaggcagcaaacgcctccgtctctcgttgcgtctcaggtatgggcatggcaggttagaggctcgcgttgcgttaattagttacagctgggacgagccctccacacgatttgctgcccccctactcgtgtcaatccgtcagtgtcatcgtctcatcgacccatcgtccgctcagtcgctgacgcggaggcggagcctttgtgagctttggagctagcgcggcccaggcctccaactagatgaccagatgcgtgggcaaaatgcagaggaaaacgcccgcacggatggcacgggcgcacggcacatcaccgcaaaaaaattgtcgagcaggtgacgccgatgcgcgacctgacagcgcgagccatggcgccgtctctccggggtccgggccgctagcatctgcagtatgctgctcacatctctcgcgccatgtcttatcatcatctgccttgcaaatcttggcgcactgggggacgctggatgggacggtcgatcggtgggatcatgcgacatatcgtcaggcggacatgcacttaagctgaagtcttggcgatgcatgggtcaggcaaatcttgaacagtaggacacgcactcaaacggtatggcacattattggtgaagaaaaatcttgagcaactagttgaatacaacaagtttcttcgtactgctcaagattggtgtggatttgtaatgacctaccgctaagtatatctctatgtgtggtcatgttctctcattggggcttactattaaggcaccatagaatgttgtgtaaatggttgcaataatgcatctcgaaccatcggaatcaacggtttgattgggtgtgtggcagggcccaaataggcatgatcatagacagttcaactgactgctcaggactcagtaggagacagaatcatagaaactagcgactcgatcttccttctttacggacgaattgtcaaagaaagatttctggccgacaagaagcttacacatcagtcgagtttaaatgtcttgtagtctatccatacctagaatagtaggtatttgagaaatgccgaggggtcttccggctagctccacaaggtggtgggctagacgacctgggttcaaagactcacccctcctaattatttgatattagatccttccctaatattctagttttagaatagtaggtacgtacgtacgtataaagccagagttcggtatgtgcttttaaatgatacacataagtcatatatcgtcctcttataacatttcagataacatagactttaaccattaacctacctaaataatttttctattacttgtatttacttttcccattctcatataacaaatttttactctctccgtttcaggttataagacattttgactttggtcaaagtcaaattattttaagtttgaccaagtttatagaaaaaaataatattttcaattcaacacaaatttattatgaaaatatattcaattattgatttaatgaaactaatttggtattataaatattactatatttgtgcataaacttagttaaatctgaagtagtttgattttactttgaccaaagttaaaacatcttataacctaaaaaggagggagtacctttacaaaggctaaggctatattctttccccaggattcccaactcatctccttcgttttattttataaaggctaaaagagtcgatatgaaacttgacatcgatgtttttctcttctctttccatgtaaacatattttctactagttggcaagactaagaaccctttgttaatgaccgttttacatgccgacgcttccatgttaatcaagggataaaacaagggagaaaaataaatgccacctgattaaccagtcaggtaatggtaatatcatagatgtacggctttatcaactaggctggtatgaggggcggagcccaatgggctggaggggttcccaggcatctggcctatttttaaaatttagtgcttaccgcccctaattttgtatcttaacttgtcaacgaattcaattttcgtccttcaaccaaaaaactagatataattggtctctcaactattaaaaccggtacaatataggtcccatagcggtttggagggcagtttttgctagcgtggcgcctatgtagataaattgactcggttttcatctaatgtggcagtgatatggcagtgacatgacaatttgatttggaaaataataaaaactgtgaccccacatatcagttttaccaaaagaatgaattaaaaaatagtggggccacgtaggccccatatgtcattctctgcccatccttttcttcctcctctctctccccatccctcctccgctctctccatgcgccactgggtcatggggaggtccggcggcggcggcggcgacgcaggagaagggcaaggcgtttgcggccggagcgctggggggaggggctccgtgcacggggcgctgcccgtcccgagaagctgctcctcgtcttgggccgcggcgtcggcgcggaccccccgcgggggcttggggaggagttcggggccgcggcgctgcccgtctccgacgagctggagctcgcgcgggcgcggtgctgggagctgcacgaccgcgtcgtggcgtccccttccctgccatggcagcccgcgcgctgcggtccatcctccgcctcgtcgctgccgatcaagctgccgttcctcgactcgagcggggcagaccatggggcgcggccgcgcgggcggggccactgctctccaccaacctgcccacctcgccgcccaccccgcagcttgcttgtctcgtagtatatgcagtgtacaactgtacatacagaagcgcagggagaagtagctgagctcgattgcagccaatattggctcgacgcaacattgccaatgttattgtgcagcagctatatacaaatggattcagacgaatagtaagttcagtaaaagggcagctgcatatcgatcctaccattgacatcgatcgacgcgggagctgactactctaaagtcctaaacgacaccattaatcaatggatagctagctaaaggaagagttcaactgcatgtctgcaactctgcatgcttatggttcatcatgcatgatgtttatggttgggggttaaagccagcgtgaagtgaacacatgtgttgtacttcaactacattggtaagagagtatataattggactgagctgcgttggatggatgtgaagaagagcgagacggcacgaggcaagcagcagatgatgaggctgcaaaatgagaaggaacaagagcaagtgatgacgacgcggtcgtgcatctcctaacacagcacccgcgcgagctccagttcgtcggagatgggtggtgccaaggcaccgaactcctccacgagccccgcgcggggtccgcgccgacgccacgggcgaagacgaggagcagcagcttctcagggcgggcggcgccccgtggagcccctcccccagcgctcccgcatcatcgccgctgccgccaccgccggacctccccatggccccgtaacctggagagagagtggagagaggaggaagaagaggatggggtgagaatgacacgtggagcccagagccctactattttttaattcatactttttgtgtaactgacacgtgggatcatagttttttttattattttccaaatcaaattgccacgttaatgccacatcactgccacgtcagatgaagaccgagttaatttagccacgtaggcgccacatcagcaaaaaccgccctccaaaccgtcatgggacctatattgcaccgattttgatagttgagggatcaattgtatctggttttctgattgaaggacgaaaatcggattcgttgacaagttaagggacctcggatgaacttattccttttaccatatgggaacccttggcccaacttggtgcaccaccctttggcccatacgcaacgctagaaaagagaatgccctggactggacgcctcgatcgcttcgctggttgctacgccacgtcgcacgcccgtagaggcgaaccttcctttcctttttatttttttctttttccctaatctcggattctaattcgctccatcgtttcgaactgccgcaccactcgccgcctcaccctgacgccctcaggcaccatcgtcccatcgccgtcgatgccgtcttaccgtagagccggaagaatcgatcagcacggcaagttgcagttcagttcagagtcagccccgcacttaatttgcttacttgccatctgtgctactagattgcttctgcttctcgtataaatagggacagaggaaaggtatctatctttcttttctcattctaatcaagtttatctgatttgtgcaaatctctaaaattaaaagtgttgtctgaattatgtgaagttgattaatgttttttctttcgtttttccatattagggtttaagaaattgaactttcagtctctaaatgagaacttcgataatcaagtaaccgagtaacagttattttaaagttgtttcatttttatttttaataacttcgctctgaatgtatgaaactatccaattgacaggttatggacaaatttctgtaaaagaaagcgccggatagtatcaataatacaaccgcaaggaaatcatgtccagaaatagatgatatagttgggaacatgagattgaatatgagaaaaattgccaattgatcgctctatgaaaatgagaaaatgagaacatgagagtatactagaaggtagttcttgtttatgactagatgtatacaattttagtgcaaaattaagatatgcatgtttttgtttaatgtaggtcattgactattggtatctttcaggatgtattttgtctatcttttacgattttcttcatgttcccctccacagcttcctttcctcctacattttggtaagaatttttgctcgctactcattaatgttagttttaaaacttgtctataaatagtaaaatatcattatttagagcaatgtgccgctatatatgtgataaagtggtacactcccctcgattatgttccagctccacacgactggtatgttttcaattggatccgatgtaagaaatttatcattggcttccatttgtttaagcatgtcttgagaggacgtgctcttaagtgttcgagtatgtaattgtgtgcttgtgcgttgtcttccatgtaataaaaatattcccataataacaatatgaaaacttaaaatgaaacagaaaaaaaaagaaaatatatattaattttgtatacaaatttcaattagtgtaagttacaataaaagataaacaggattagagtaaattatagggagaattgtgttctagcctctgctttgagttgtaattgtcatttcacccttcctttttgagaaaatctataaaataccatcgacaagcaccctaatcctagaaataccatcgacaaacgtaacttcctaaaattgccatcgtacaaatctatttctcccagaaataccatcacaccgtaactgttgttaacacctctccgttaagttgtatgaaaagacaatcttacccctatgcaaccattcgctcacacaacatcattctgtattgtttgcccacacaacattattttgcattgatgtatatttatgttaccttctaaattcacagacattattattttgttatcaatcaaattatttcagaattaaattcacaaataaatttcacacatttttccatccaaaatatttcagaaattttgctatcaatcatcagggttgtgatatgagcaaaaaatagggctattaataatttcagaaattttgctagcaatctaagctaaatatcactgcatggtttcagaattgagtacaacaggtagactgcctgacaataaaatagagctaccatcaatcatttttcaattccttggtttacatctttcagacattgaacatacaaactaataatcaagtcaaaactcgccggctcctgcgaccaccgtgttgtcgcatgcggcccctgcgtcatcccctgtgctgccgcctgccacctccttgccgcccgtcgcgtcgacacctgggatcaccgtgaggacgcctgctgctgatgcgccgctgcctaggagccccgcggtaccgcctgggggtcccacggcgctgcctgggagccccgtgccaccgccttgccgccgtcacccatcgggagctggatcgggttaggtttagggtttcatcttttcccaatttttttcctttacgggtggattgggatagtataatttggagtgagggcaatttggccattcttgtaaaatattttgttctaacggtgtgatggcatttccgggagaaataggcttgtacgatggcattttcaggaagttgcgcttatcaatagtatttctgggattagggtgcttgtcgatgacattttatagattttctctttctttttaggtttatgatttttatcctcgctttttcgaaccaaagctgtagtttacccctttttgggatagctgttaggtgggtccagacatagccagtggaaatacacatgcaaatggaaatcaactttagttagatgatgaagttgtgggtgcataaatcgtcccattagtattcagatcatattaccaaaaggtaacaacttatacatgtggatgttttcttgagcatgagttaaaagaagtcgcactggtaagtgagtaattgcgtgtttttttattaaataaaaaatatgtgcaaatgccaaatttgcgcagtttttaacactgcaaccaaatatatctttcttgcaagagagtgtatggttaagaatctatctattatattattaaaacagctttgaaaggagacaccacgttcgctgtgggaggctagaaatttccacattaatcggagaaaaagaaaaaaagaaaaggagagtccaagtagaaatacaatctaaaaatagctgaaattcggaattaaaaataagctatattgaaagaagtttccatataacaacccaatacgagattaatacaaattcgaaataaaaataaaataaaatccgaaattataaaataaaaggagagtccaagtaagaatacaatttaaaaatagctgaaattcgaaattaaaaataaagaatattgagagaagagtctatataagaacgcaatacgagattagttaatattcggaataaaaataaaaaaaatcgaaattagcaaaaagaaaaaaaaatttaaagtaggaatacaatttaaaatcaactgaaattcggaattaaaaataagcaatagtgaaagaataatccatataagaaaccaatatgagattaattaatattcagaataaaaaataaaagagagttcaactgaaattcaaaagataaaaaaataaaaatattaaaaaaaacactatacggtattaattaaaaaaattaaattagaaaaagaaaaaaagattttaattaggaatagtggtggcagttgatacgatatataaaactgttagtaaaacatcaaatagaatcctaatgatgattaaaaggagggacgggcaagacggttgccgggacttctagaaagtaaaaaaaacccattgataaacatattcgatttttaaaatctcaatgagaataaaaaggagaagcagcgtgcgcggggtgtataggagtatagttgcagaccgccgacggttggcgggatttctagaaaataaaaaataaattccaacgatagttatattcgattttagaatcgcaatgaaaataaagaataggcggcggatgggccgtagaggtgtatagtggcatcgtttgacgggacttctaaaaattataaaaaatgaaacccaacaagaaaataaactctaaaaactacaaggtccaatttttaaatgttcggaacttctaaaaagtaaaattaaaacaatgataatcatgatacattttaaatttcaatgacaataaagaggggaggcagcgggcaagccataaaggagtacaatggcaaaaccgctgacggtttggcgggacttatagaaagtaaaaaattgaacccgaacgattattatgttcgatttgtaaaatcccaatgacaataaagagaaaagacaatggacgggccgtagatgagtataatggcagcgtttgacgggacttctagaagttataaaaacgaaacccaatgagataataaactcaaaaaactataagatccaatttttagaggtttcaaggagaatgaatagaaatagtggtagaccgaggaaacaaaagaaggatatgacagaagtaagaggtagcagctggtgtgacttctaaaaagtatataattagaaatacaaggatagctatttaataaatcttaagtaaaatcatgctgaaaaatatatggttttgtttgggtgctagccgcgcaattgcgcaggccacccggctagtttattgaaatatcttcaaagagaactctcttattagttattagagcttttatatgtcatgtaggatgacctgaagtaataaatataatttcgcaaaaaaaataagtaataaatataacaccatgttttctcgacatgttacaggtttgggcatttggcacagaaatttcttactgaagaacacccacaaatacgcatattttctgcccacgaggatttgtggtttgggatggtgccatactttcacaacttcaacactcccaccaaaatttatccgtgtccctcagctatatattcgaagatatgtcaagcacacatgtacgaataaatactgccaatccagaccagtaagttaattaattaccgggtaacgatctgtttgccaatcacttaccgtgtatcgttcttttcagtaggagtacaattttccagcgcgaccacgatacggatacaggacctgaaccggcggtttttcgcctgctggtaccgtgttgcgacgtgaccgcctgtatttctcatgtcaaagttggcatcctgtatcaagtggtaatgatcgagctactttgtccgggacacaagtcaggcccacagttttctagcccagttgttatgggaaggtccagttgagtctcatcgaaacccaattcttgttatttgttctcttttctccatactattgcaacggatttaaaaaaacaatttattgcatatatattgttaaagcctttaaaataagtcattcttattttctaatataccatatagcaatgaaaaattccatgataagattctttgatatgcaacggcaagttatatttctatgttgatttagcccattgtaaggggtttctatggcccgataaacatttgtgatcctattcgtattgctttgtattcattttatttgatagtttttgtttttgtttctgaatttgaaaataatattaaaaaactaatgtggtagaggtagtttctgtccttctccgcttcgtttcccctagtcctatgcacacaatatgtcaatatgctactggaaagaatgcagaattggagaagagtcaatgttgcatgtcaacttgttagtataagtacagcctgttaggtcacatcttgtgtttctttatttttctttttaaatgcaactcacatgattcagcgaactacggaaaacaaaatatagaagcatccgcaaacttctgggtttaatgtaaccgtctcatctttgtcttccgtaaaaaaatgatcatgttctactgtatcctactaaattatactccctttcgcagctgttaatatacgctttagctacccacccggggtttctactttctgtacatttagctacccacgcgttcaggctacaacctacaaaaatggggaacagtggactaaaaggttttccaagtgtaatcacgagatccctgatgaaattggttgtggctggcctttccttcttatggctgaggactgtgttgcagtcattttctctcccatagctgtccttatatggtgatcctgattccacatagtgtagcaccggggagtggattctaatccctcgaggggatatcctctcgtatacctttttcttctaaattcgatgcaaatagttgtgaaaaaatctgaaaaaaattgacaatgtagagtataatgatacctactagtccaccaaaattcatgttcaaattcgatctacacatcgagaaacaaaaaagacaaatttagatataaacagtacgctactattcatacgctgaatttgtcttttttatatctcgacgtgtgagttgagtttggacttaagattttgtgaagttgtatatatgtgttgtatgaatattgtcaaatttttccagaatttttcataaccatttagatggtttttgagtaaacgagggaacatcccctcgagggattagaatagtttcccgtagcaccgctcttgtttatataagttacccattgtgtatatatatatatatgcctcaatggttttgaccagaagctgccggggatctagcaccatggcatgcaatggctcacgagccgtcaggtgagcccttgtgccaatcagttatttccagcacaaacttcagatcacttattaactggttattgccagttctctaaacatgagcatggtagatgtgtttaaccaacctgacatcttcagatcactcaacaaatatttcagcttgatcaatgtgcttgatagaattcacagctagttaaagttgagcgaattatatgcttggtacagcagaatctgtaagaaaaaacccttgtttcttcaggtttcagaatgacatggagctcccgcactggaaaacatcaagcgtgccggagtgcacgtcgtcgagcaggtcgacgaagcacggcaaggctcaacaccagcagcagcagcaccacgacccgaggaaatggcggcgaggcggcggcggcggcggcagcctcaaggaccgggtgctgtcgcgggccttctcggaggagctggagtcgctgatgagctccggggcgaaccacctcttcttcgacccgcgcgggcagttgatccacctgtggagcaagatcttcctcgccgcctgcctcgcctccctcttcgtcgacccgctcttcctctacctcacggggacgaggcagaacatgtgcatcgagctgaagtactcgctggcgttcacgctctccatgatccgctccctgctcgacctcttctacgccgcgcacatcttcttccgcttccgcaccgccttcatcgccccctcgtcgcgcgtgttcggcaggggcgagctcgtcatccagccctgcaagatcgccaggaggtacctcgccggcaccttctggttcgatctcgtcaccgcgctgcccctaccgcaggtaacacgaacacgaacacaaaccaacctgtcggagtcagagcacaggacatgaacggtggtgtttcttggcgtgcgtgcgcgtgctgcagttcgtgatatggattgtgataccgaagctgaaagagtccgcgacggccaaccggaagaacatcctccgcttcagcatcatcttccagtacctgccgcggctgttccagatcttcccgctctcgaggcagatcgtcatggccaccggcgtcatgacggagaccgcgtgggccggcgccgcctacaacctcatactctacatgctcgcgagccacgtacgcgtcactctcacgtcacgacggcgcttgcacatatacatgcacactctacatgtgcactgaacttgttgacagatgttgtgtgacgtacgtgcaggtgctgggagcactgtggtacctcttctcggtgcagaggcaggaggcgtgctggcgagaggcgtgccacgtggagggcccgtcgtgccagaccctgtttttcgactgcaagacggtcagcagcaacaggacgatgtggtacgagctgagcaacattacgagcttgtgcacgcccagcaatggcttctaccagttcggcatctacggcgaggcgctggacaacgggctgacgtcgtcgtccttcacgcagaagtacttctactgcttctggtgggggctgaagaacctgaggtacggcactgatcgatcgagcgatcatagtgaactgaaactactttaaatcacgtcccggttttctgatttacttcgaaaactgttggacagctgcttggggcagaatctgtcgacgagcctgttcatcggggaaataacattcgcaaccgtcattggcgttcttgggctggtgctgtttgctctgctcatcggcaatatgcaagtaatttcctctataccatatcaaagaaatcgtaagcgatgaccactagaactcatgtgcctgacatgaatgcatgtcgtcgtgatgctgtgtctccgacggacacgcgtgcagtcttacttgcaggcgacgatggtgcggctggaggagtggcggacgaagcggacggacatggagcgatggatgaaccaccggcagataccgcagccgctgaagcagtgcgtgaggaggtaccaccagtacaagtggttggccacccgcggcgtcgacgaggaggcgttgctcgaggacctccccatggacatccgccgcgacatcaagcgccacctctgcctcgacctcgtccggagagtaggcaccctgatcaatgcatgcacggccgagctcgggtgctaagtgcgccgctgatgtaaatggtggacgcgtgcttgttattgcaggtgccgctgttcgacgagatggacgagcggatgctggaggcgatctgcgagcggctgcggccggcgctgtacacgaggggcacgcggctggtgcgggagctggacccggtggactccatgctgttcatcatccgggggtacctcgactcgtacacgacgcaggggggcaggtcggggttcttcaactcgtgccgcatcggggcgggggagttctgcggggaggagctcctgccgtgggcgctggacccgcgccccgccgcgtcgctgccgctgtccacgcgcaccgtgcgggccgtgtcggaggtggaggcgttcgcgctcgtcgccgacgacctccggttcgtggcgtcgcagttccggcgcctgcacagcgcgcgcatccggcacaggttccgcttctactcccaccagtggcgcacgtgggcggcgtgcttcatccaggccgcctggcgccggaacaagcggcgccgcgcgtccatggagctcaggatgcgggagggcggcgaggcgcggccgggagggagcgtgaggtgtcgtcggcacagctgcgacggcaaagcgctcatcaagaaacccatggaaccggatttcaccgtcgaagaagaggactgatctaatcgaatagatcgatcatactgtgttttctgttcagttagctagtcatgttacgttctgatgtacttttgctttgagtggtgtgtaataagttgagctgcttgtatcaacttgaagttgcattttgtgtaagtatttagacgcttttgctagatatacattggtcctgtgaatgttctagatatacatttagacgcttttgctagatcgggaaaattggttctgtgaaactgtgacatatattgaaagatgtcgttcactagtagcaatggctaaaaaaaatttcggatgatcgatcctcttctctcttttttcccttttgcattttcctcctctttctttctttgtcctccttcctcctctagttcctggagaccgaagcacccttgacgcctccctcctttgagttatagagtacaaaatattgtccagcattacgagtacacaatttcaaaattgttttctttgagcttcattagaggttactcgctagtactaagcctgagttctttcctctcctttcccaacaaatcttcctctttttttgcacgaacgtttttcaaactattaaacggtgcattttttacaaaatttttctatagaaaagttgtttaaaaaaaatcatattaatacatttaaaaaaagctaatacttaattaattatacgctaatgagctgctctgttttacgtgcaccaatgattactttccaactgtgtctactgaacacaacctaagtataagtatagttaatgctaatctactcactaatttcggaacttttgctgaaaagacattgggtaatgtcaatagattaacatggtgaaaatgaactggcaaccgagtgattgaaaactacaactcgtcagaacaaacacaagagaaatgatttggttccactgatttcgtgtattgccaattagtaatgatgtaagaaagggaaaaaaaatacacaaagagttttcttacacatttcttgatgcaattttttttaattctatgaggcatatgtgtacaaggtatactcgtgtcaatagttagattgataaatgactcacttaactcatattagtgatctatatgatacatctatataagttggatgatcctctatatattttactatttaaattttagaattgttgtgaatatgagattccaacacaatcacaactctttctgtctctttttttttatttcggagaaatacaaatactagtcaattgtaccttgcatggattattaaactatacttggcgtatattaataataaaattcgaaattattaaactatggagaaaatatcattgagcttgtaaactgtgtacaactttgtatatactagtccacggctcgaagtggtttggcccgtgcgccgggttaggcggtgagagaggcgcgtgcgagaaaggccagagacccagtggtctcggagatgggcgtgcgatggggaatcgcgccagcgaaaaaaggcggcgtggagagggagcgagagaaaggggaggcggccatggtggcgctgcggggtgcctcaaggggactcgaggagggtggcgacgcgaggaatcgactggtcccgcgccgacggctgcgagcgactgcgcacgacggcgacgaaacgggaggcacggtgcggggcatgagagaagactggcggccagaggaaaaggtttgggtatgttgaaggagtctccaggagagtggcgacgagcgagttcgacgagaggagtccacggcggcgcacgaccatgcgcggcggtgaaagaagcagagccacggcgatggcgtgtctcggtggacgagtgagcaaccaaacggctcgggagtcatctatgagtctccgtaaggtgtaaacgggaggaattgggcgaggagctcactagtggccttgaaccgacgtcggcggcgatgcccggtggtgagaaggacgggaagctggcggggaaggcggccgggtttcaggcgagcacgccggggacggagatggaggcgtgcgaggatggaacgactcggtggcggcgtggcgttcttggacggtcatggtgaggaggatggtggcggcagggcttcaccggttggagcacgatgcaagagaaggagaaaaggagccctcgggtgaatttataggcgatgagggtgtcgcccccagagattcgataatccgaatcacaggatatatgtgcatttaacctctgtctagacattaaccagagtacacagatgataatttgatatagttccacgccttataaaaatataaaataaactcagaaaagcagccgaaaaactaaagaccatctaaacttaatcttatcagtaaagcgaagtttcctccataatccataggcaaaatcttgacggctggcacaagcctaatcttcatagaacacaccatctgatagattctcggcttatgggggattggggaaaaataaagcaagactgagtacggccagtgtactcaacaagtcataccaaggggaatgtatgatgcaaaggtaatcaaaggattggctcataggatattttacaataaaaagcagcatttgtaaatcataagttgaaagcagtaaaataatagataattaagcagtattaacaccatcactgtccaacgctaaaccacgttacgacaggcccaacccaaaccacctgaactacaccagttcattaaggcaaattattaaggtgagactaatcacgatgagctggttgaccacccaataatctgattggaggtgtaatactttaaccacaagacacgattccgcacatgaaaccatgccccgaagtaccgctatgatactgcaaaggcggaaatcgtgacaaaaccatccatataacaaaccctaaccagcacacccacctccggtttcacccccatccctataaggcgatgggcagtccccgctcgtgcgtaggtaaatccgaaagcagcatagaccgcctcccggtccatctatactccatcacgcctacccttgccaatggtatgctagctagaaaagattatacttaagattcagcttggagcccatctggcttatggttagtatgagtatatcttcaagggattcccgagaaccggtctttaattgtcatgggcacgaccaccaaataaatcatgcatgtacccacgacccatcaataaagcatattttaattaattaaccatatgccaagatggcataacatcatcataaaaataaggactatattatagtgaatcccattgtgagctagttgatctaagcatggctaagcattcctaaaccaaacatctagtcaaattattatcccaggctatcaatgaatcagggtaaacaaaggctgagtacgggtaaaattccatcccacatgacattataaaataaagcaattttaagagaaaagtagggattttgcaaataggatcaatatgatcaatgatatttgtatgacttgccttgctcttgaactgacgggacctcggcgaccacttcaaaataaactggagcgtcggaactgccggagtctaaacgacaaacaaggcacacaataaatacaagctaaaaagctactgaaacagcaaaagaaaccaattttaatggattcttgacattttaacgaattcactacaatttgaatgggttaaaacggagctcagattatttagttatgaaatttacaagatgctctacgttattactaataacagaaaaaccttaatcagttgatagagattaatgctcaaaatgaaaaataagaacaaaggatagattgactggcaagtgagcctcacgagataccgactcaacgagtcaattctacaggacacgggatcacccaaatgatcaaccgaaaccagcgaatggaaccggtggctctgaacggctctaaactaaaggacaactcaacatggacgaatgaacgaacgagcgaacgactcaacaacagttgcggctaaactggcgggctagacatgattcacggtaaagccctggtacggcaaacgataggccggtaggaacctagggttgcacctacagctagacaactcaactaccgagcaacgggacaaaacgacggctaggctttagtggtgcacagctgcgacacagcgacgcaaagcggcggctcgcctcagaggcggcgacgctcagcagcggcggcggcatggcatagcgcagtggcacggcggtggcggtggtagcacggcgcggcacggcgcgacagcggtggcacagcgacacgacacggtagcatcaacatgactaaactactacacacgggaacaaaaccataaaaacatgagggagcttctcactagagagcaaaaccgacgagggaacacaacgacggtggaggcggtccagcggcaagcacgagatcgacgacgatgacggcgctagagaggacacaacgggctaggttagacggggagataattgacattgggttcaaccaattcaattaagagggaaaacggattaccggcgacgcgagggcaacgacgatggcggcacagctagggcggcggtggcggctaccgaggaggaaaaaaaggaaaagaaaacaggggagggatcacttatataggggagtactggtttaggaaaggaggagtcctagagggagtaggactgggaggaggggagggagaccgactcggctagggaagggggagggcgcggccggctggagagggggggaaggaaacatggggagacttggactttcccacaaaggaaaaacaatgcggtgccgttttaggaaaaggacggaaatggtctcgcgaactaaaaccgatattgtttgtcatgcaaaacgaaaccgcagaatgataggggagtgaattgggcacaattcatgaccaaagacaaaggaagaaattattatcttgacacttttaactcagtaacactgcctccggtgatctaatatttactctttaagtcctgttagtgattttcagagcaaagagaatttgaaaaaaaattctccttaacaattccgatttttaattgtattcttaactggggttttctcctggttaaccaaagtaaatcctcgaagccatttattagtgatttggatcctaagggaagggaaaactccgggtgtgacagagggcaaacactagttggcagcggcgttttcttgggcggcacgtaaatagtggacgacgaggatgcaaagggcggtggatcgagcggcagaaattgaatcgtgggagcgggaggagcagcgtggtgcgatcaagggcaagaaaagcgagctggcgactagcgtcagcggctctgccgcctagtgcaagagggagaatggtagagcccgagagggaaaaagggtgggaggacggtggaaagggcagcttgctccttccgtttttgggcagcgaggctggcgagatgcgtgggagcggtgttgccgcgttggcggcatggggcgtgaggaggtggggccaatgtgacatggcggatgatagcaaaaaggagagctgggtgggttgatagcgagagcgaaccaaggcggtcgacgcgacaaacgaggtgacgccggcattctagccggtcagccacgacgcggcacgcgggaatcggtgcggtggattcaaacggcggcgagcgaagtcggcgcaaggacggaggtggccacgtgctgagagagagagatggagagagataggaaggcgctctcttcgcggtggaggcacgtgcgctgcacttggagagcgagggagacgaagggggttgggccggtggcggatttcggccaaaagcatcacgagggaggtaaaatagactttttcagggaagtcgattgagagggatttgggtttggaatttaatggggatttgaattcaaattgtatatttgaattcagctaaatatgaatgaaatcaagggacggaaaacaaaacgagaattcaatattttttataggtttgtactttgggacatgtaggattatttaggaggcatttgaagtgggatgtgagtccaaatgtaagatccgaagagaggaacaatatggggagtcaaggaaaggacatcaagatggaaacttgatatctttcgatatttttttataggtttgtactttggtacttgtaggattatttgggaggcatttgaagtgggatgtgagtccaaatgtaagatccgaagagaggaacaatatggggagtcaaggaaaggacatcaagatggaaacttgatatctttcgagatgggtttgtatttttggaatagatttgtgtttcggcttgatggactattttggcagagatccaacaatgaaggaaacaagtctcaaaagttggggttccacataaaagagttgaatttggatctgtgtttttgggatttggaacagatgcttggcagaggatttcaaaggatgatagaatgataggtagagagattgcaaggataggagttggatgcagatatcgcgaatcaacttattcagaaggagtccaaggaaggtggagagggagatggtggaatttgagaaatggagtttgaattcgagagttggtttgaaggaattcaaagaggaagacaatatttagaaatgaatcaaaagggagatggatggttagagggagagtgtgtaactcgagagctggaattcggattcgaaccggattttgggacgtttatttggttgcaaggaattagggatgactggaatgtcgattcagatcatctgagggattagtgagttcgacagaggagtccacggaggtggcaacagaagcaaagccacgacgatggcgcgtctcggtggatgagtgagcaaaccgaacggctcgggagtcatctatgagtctccgtaaggtggaaacgtgaggaattgggcgaggagcttaccggtggccttgaactgacatcggcggcggtgccaggtggtgagaaggacgggaagccggcggggaaggcggccgggtccgacgaaggatggcgtttgtggcggcagacttatttgacagggagacaccaagttggctaggcggcggtgcacggttacgaacatgacgccgaggcaacacagtgccgagacgagcacgccggggatggagataaaggcgtgtgaggatggaacgactcggtagcggtgtggcgttcttggacggtcacagtgaggaggatggtggtggcagggcttcaccgcttggagcacaatgcaagaaaaggagaaaaggagacttggggtggatttataggcaaggaggacgaacgcgagctggcgctcgcgagcggcagcggcgttttctttggtggcgcgaaaacggtggacgacaaggatgcaaagggtggtggatcgagcggcggaaattgaatcgcgggagcgggaggagcagcgtggtgcgatcaagggcaaggacggtgaactggtggccggcgtcagcggctctgcccctgagcgcaaggagacaagggcgtaaaagggagaatggtcgagcccgagagttaaaaagggagggatgccggtggaaaggggagcttgctccttctgtttttgggcggcgagactggcgaggcgcgtgggagcggtgtcgccgctttggcggcttaggacgtgcggaggcggggccgatatgacgcagcggatgatggcaaaaaggggagctgggcgggttggcagcaagcacaaacgaaggcggtcgacgcagcaaacgaggtgacgtcgaaattcaggttggtcggccacgacgctgcgtgcgagggaatcggtatgacggattcaaacggtggcgagcggagttagcgcaagggcgatgacggccacatggttagagagagaaggagagagatagggagccgctatctccgcggtggacgcacgtgcggcgcacatggagagcgagggagccgcagaggtttgggtcggcgacgggcttcagcccaaagcatcacaagggaggtaaaatagactttaggaaagtcgactgagagggatttggaattggaattgaatggggatttgaattcagctaaatataaacgaaatcaaggaattcaatatttttttgtataggtttgtacatggggacttgtaagattatttgggaggcatttgaagtgggatgtgagtccaagtgcaatatacgaccagaggaacaatatgaggagtcaaggaaaggacatcaagatggaaacttgatatctttcgggatgggtttgtattttgggggctcaaggaattatttagacggaatttcaaaggagagcgaaatcttgctaggttgaatgtcaaatcgggaactaggtatttttggaatagatttgtgtttgggcttgatggactattttggtagagatccaagaatgaaggaaacatgtctcaaaagttggggatttggatccgtgtttttgggatttggaactgatgcttggcagaggatttcaaaggatgatagagcgataggtagggagattgcaaggataggagtgcagatattgcaaatcaacttattcggaatgagtccaaggaaggtggagagagagatggcggattttgagatatgcagttcgatttcaagagttggtttgaaggaaacccatggaaagtttaggtttcagaggtgaagcctctgattgagttagggtttcaaagagaatgactggatttacatcttggtgtcggaaaaggaattcaaagaggaagacaatattcaaaaatgaatcaaaaggaagatggatggttagagagggagtgtgtaactcgagagcatgaattcggatttgagaaccgaattttgtgacgtttatttggtagcaaggaattagggatgactggaacgtcggttcagattgtctgagggattattgaacttggaccctgaaattggtcaagtgggatttaagagagaaattcgaatacaaaggttcgaacttctagaattgtttcagtgaatcaaggggcgaggttaggatttacgaggtagatgctcgggctagattggtttcaggaattcgacgagatctgtgaggttctagaagcgaaatccgaatataagtattcgaacttcaaaactattctcgaaacgaaaacaaggattcgagtttgccgaacttgaggtttgcaatcacagaatattcgcaagtgaccggagatgatttgagtgcggactcaaatttttgaagaacaacaggactaggatcatttgaagggtagtatctcggtagaggtttagaaaggagattttgaatacaaggatgagattattttcaggcagggatttttgagacaagtgaggcttttgacattagggaaatgagacaaaggagatatttaaattgagatcaagtttccaaatataaaggaaatcaaggaatttgatattttttgtataggtttgtacttgggaacttgtaagattatttgggaggcatttgaagtggaatgagagtccaaatgtaacatacgaccagaggaacaatatggggagtcaaggaaaggacatcaagatggaaacttgatatcttttgggatgggtttgtattttgggggctcaaggaattatttagatggaatttaaagggagagcgagatgttgcgaggttgagtgtcaaatcgggaactcggtatttttggaatagatttgtatttgggcttggacaatttcaggggaaattggtatagtgggatttaagatagaaattcgaatacaaatgttcaaacttcgagaattgtttcagtgaatcaaggggtgaggttacgatttacgaggtggatgctcgagctagattggtttaaggaattcgacgagatctatggttagggttctagaagcgaaatccgaatataaggattcgaacttcaaaactatactcgaaatgaaaacagggattcgagtttgccgaacttgaggtttggaatcacggaacctttgcaagaagtgaccggagatgatttgagtgcggactcaaatttttgaagaacaactggactaggatcatttggatggtaatatctcggtagaggtttagaaaggagattttgaatacaaggatgagattagtttcggacagggatctttaagacatgggaggcttttgacatttgggaactgagacaaaggagatatttaaattgagatcaagtttacaaatataaaggaaatcaaggaattcgatatttttttataggtttgtacttggggacttgtaagattatttgggaggcatttgaagtgggatgtgggtccaaatgtaatatacgaccagaggaacaatatggggagtcaaggaaaggacatcaagatggaaacttgatatctttcgagatgggtttgtgttttgggggttaatggaattatttagacggaatttcaaaggagagcgaaatcttgcgaggatgaatgtccaatcgggaacttggtatttttggaatagatttgtgtttggactattttggcagggatccaacaatgaaggaaacaagtctcaaaagttggggttccatataaaagacttgaatttggatctgtgtttttgggatttggaataggtgattggcagaggatgatagagcgataggtagggagattgcaaggataggagttgaatgtagataacgcaaatcaacttattcggaatgattccaaggagggtggagagagagatggcggaatttgagaaatgcagttcgatttcgagagttggtttgaaggaaacccggggaaagtttaggtctcataggtgaagcatctgactgaattagggtttcaaagagatttgactggatttacttcttggtgtcggaacgagtattcgggaaggaattcaaagaggaagacaatattgagaaatgaatcaaaagggagatggatggttagagagagagtgtgtgtaactcaagagcttgaattcggattgggacgtttatttggtagcaaggaattagggaggactggaatatcggtttagattgtctgagggattattgaacttggaccctgaaattggtcgagtgggatttaagagagaaatttgaataccaaggttcgaacttctagaattgtttcagtgaatcaatgggcgaggttaggatttacgaggtagatgctcgggctagattggtttcaggaattcgacgagatttgtggttagggctctagaagcgaaatccgaatataaggattcgaacttcaaaactatactcgaaacgaaaatagggattcgagtttgccgaacttgaggtttggaatcacggaaccttcgtaagaagtgacgggagaggatttgagtgcgtactcaaatttttgaagaacaacaggactaggatcatttgaagggtagtatctcggtagaggtttagaaaggagattttaaatacaaggatgagattagtttcgaacagggatttttgagacaagtgaggcttttgacattagggaaccgagacaaaggagatgcttaaattgagatcaagtttccaaatataaaggaaataaaggaattcgatattttttgtatagatttgtacttggggacttgtaagattatttgggaggcatttgaagtggcatgagagtccaaatgaaaggacatcaagatggaaacttgatatcttttgggatgggtttgtattttcggggctcaaggaattatttagatggaatttaaagggagagcgaaatctatgaggttgcatgtcaaattgggactcgctatttttggaatagatttgtgtttgggcttgatggacgattttggtagagatccaacaatgaaggaaacatgtctcaaaagttggggttccacaaaaaagagttgaatttggatctttgtttttgggatttggaatagatgcttggcagaggatttcaaaggatgatagagcgataggtagtgagattgcaaggataggagttgaatgcagatatctcaaatcaacttattcggaactagtccaaggaaggtggagagagagatggtggaatttgagaaatgcagttcgatttcgagagttgttttgaaggaaacccgatgagagtttaggtctcagaggtgaagcatctgattgagttagggtttcaaagagatttgactggatttacatcttgtggtcggaacgagtattcggaaaggaattcaaagaggaagaaaatattcacaaatgaatcaaaagggagatggatggttagtgagagagtgtgtaactcaagatcttgaattcggattcgagaactgaattttgggacgtttatttggtagcaaggaattagggatgattggaacgtcggttcaaattgtccgagggattattgaacttggacaattttaggggaaattggtcgagtgggatttaagagagaaattagaacacaaaggttcaaacttcgagaattgtttcagttaatcaaggggtgaggttacgatttacgaggtggatgctcgggctagattggtttcaggaattcgacgagatctgtggttagggctctagaagcgaaatcagtatataaggattcaaacttcaaaactatactcgaaacgaaaacagggattcgagtttgccgaacttgaggtttgcaatcacggaaccttcgtaagaagtgaccggagatgatttgagtgcggactcaaatttttgaagaacaacatgactaggatcatttgaatggtaatatctcggtagaggtttagaaaggatattttgaatacaaggatgagattagtttgaaggatgagatttttggaatagatttgtgtttggactattttggcagagatccaacaatgatggaaacaagtctcaaaagttggggttccacataaaagagtcgaatttggatctgtgtttttgggatttggaacagatgcttggcagaggatgatagagtgataggtagggagattgcaaggataagagttgaatgcagataacgaaaatcaacttatttggaatgagtccaaggaaggtggagagagagatggcggaatttgagaaatgaagttcgatttcgagagttggtttgaaggaaacccggggtgagtttaggtctcagaggtgcagcatctgactgagttagagtttcaaagagatttgactggatttacatcttggtgtcggaacgagtattcgggaaggaattcaaagaggaagacagtattgagaaatgaatcaaaagggagatggatggttagagagagtgtgtgtgtaactcaagagcttgaattcggtttcgagaaccgaattttgggacgtttatttggtagcaaggaattagggatgactggaatatcggttcagattgtctgagggattattaaacttggaccctgaaattggtggagtgggatttaagagagaaattcgaatacaaaggttcgaacttctagaattgtttcagtgtatcaaggggcgaggttaggatttacgaggtagatgctcgggctagattggtttcaagaattcgacaagatctgtggggttctagaagcgaaatccgaatacaagtattcgaacttcaaaattattctcgaaacgaaaacaggaattcaagtttgccgaacttgaggtttgcaatcaaagaaccttcgcaagaagtgaccagagatgatttgagtgcggactcaaatttttgaagaacaacaggactaggatcatttgaagggtagtatctcggtagaggtttagaaacgagattttgaacacaaagatgagattagtttcggagagggacttttaagacaagggaggcttttgacattagggaactgagacaaagaagatatttaaattgagatcaagtttacaaatataaaggaaatcaaggaattcgatatttttttgtataggtttgtacttggggacttgtaagattatttgggaggcatttgaagtgggatgtgagtccaaatgtaatatacgaccagaggaacaatatggggagtcaaggaaaggacatcaagatggatacttgatatctttcgagatgggtttgtattttgggggttaaaggaattatttagacggaatttcaaagaagagcgaaatcttgcgaggatgaatgtcaaatcgggaactcggtatttttggaatagatttgtgtttggactattctggcagagatccaacaatgaaggaaacaagtatcaaaagttggggttccaaataaaagagttgaatttggatctgagtttttgggatttggaacagatgctgggcagaggatttcaaaggatgatagagcgataggtagggagattgcaaggataagagttgaatgtagataacgcaaatcaacttacttggaatgtgtccaaggaaggtggagagagagatggtggaatttgagaaatgcagttcgatttcgagagttggtttgaagaaaacccggggagagtttaggtctcagaggtgaagcatctgattgagttagggtttcaaagagatttgactggatttacatcttggtttcggaacgagtattcggtaaggaattcaaagaggaagacaatattgagaaatgaatcaaaagggagatggatggttacagagagtgtgtgtgtgtaactcaagagcttgaattcggattcgagaaccgaattttgggacgtttatttggtagtaaggaattagggatgactggaacgtcggttcagattgtctaagggattattgacaatagtcgagtgggatttaagagagaaatttgaatacaaaggttcgaacttcgagaattgtttcagtgaatcaaggggcgaggttaggatttacgaagtggatgctcgggctagattggtttcaggaattcgacaagatctgtggtcagggttctacaagcgaaatccgaatataaggattcaaacttcaaaactatactcgaaactaaaatagggatttgagtttgctgaacttgaggtttgcaatcacggaaccttcgcaagaagtgaccatagatgatttgagtgcaaactcaaatttttgaagaacaaaaggactaggatcatttgaagggtagtatctctgtagaggtttagaaatgagaatttgaatacaaggatgagactagtgaggcttttgacattagggaactgagacaaaggagatatttaaattgagatcaagttttcaaatataaaggaaatcaaagaattcgatatttttttgtataggtttgtacttgggaacttgtaagattaattgggaagcatttgaagtgggaggtgagtccaaatgtatgaccggaggaacaatatgaggagtcaaggaaaggacatcaagatggaaacttgatatctttcgggatgggtttgtattttgtgggctcaaggaattatttagacggaatttcaaacgggagcgaaatcttgtgaggttgaatgtcaaatcgaaaactcggtatttttggaatagatttgtgtttgggcttgatggactattttggcagagatccaacaatgagggaaacaagtctcaaaagttggggttccacaaaaaagagttgaatttggatctgtgtttttgggattaggaaaattacttggcagaggatttcaaaagatgataaagcgataggtagagaaactgcaaggataggagttgaatgcagataacgcaactcaacaaacatacttggaatgagtccaaggaaggtggagagagagatggtggaatttgagaaatgcagttcgatttcgagagttggtttgaaggaaacccggggagagtttaggtctcagaggttaaggacctgattgagttagggttttaaagagatttgactggatttacatcttggtgtcggaacgagtattcgggaaggaattcaaagaggaagaaaatattcagaaatgaatcaaaagggagatggatggttagagagagaaagtgtgtaactcaagagcttgaattcggattcgagaaccgaattttgggacgtttatttggtagcaaggaattagggatgactggaacgtcggttcagattgtctgtgggattattgaacttggacaatttcaggggaaattggtcgagtgggatttgagagagaaattcgaatacaaaggttcaaacttcgagaattgtttcagtgaatcaaggggttaggttaggatttttgaggtggatgctcgggctagattggtttcaggaattcgacgagatctgtggttagggctctagaagcgaaatgcaaatataaggattcgaacttcaaaacgatcctcgaaacgaaaactgggattcgagtttgttgaacttgaggtttgcaatcacagaacctccgcaagaagtcaccagagatgatttgagtgcggactcaaatttttgaagaacaacagaactatgatcatttgaagggtaatatctcggtagaggtttagaaaggagattttcaatacaaggatgagattagttttggacagggatttttgagacaatgaaggcttttgacatttgggaattgagacaaaggagatatttaaatggagatcaagtttaaaaatataaaggaaatcaaggaattcaatatttttttgtataggtttgtacttggggacttgtaagattatttgggaggcatttgaagtgggatgtgagtccaaatgtaatatacgacccgaggaacaatatgggtagtcaaggaaaggacatcaagatggaaacttgatatcttttgagatgggtttgtattttgggggttagggaataatttagacggaatttcaaaggagagcgaaatcttgcgaggatgaatgtcaaattgggaactcggtatttttggaatagatttgtgtttggactattttggcagagatccaacaatgaaggaaacaagtctcaaaagttggggttccacataaaagagttgaatttggatatgtgtttttggaatttggaacagatgcttggcagaggatttcaaaggatgatagagcgataggtagggagattgcaaggataagagttgaatgcagataacgcaaatcaacaaacatacttggaatgagtccaaggaaggtggagagagagatggtggaatttgagaaatgcagttcgatttcgagagttggtttgaaggaaacccagggagagtttaggtctcagaggtgaagcatctgattgagttagggtttcaaagagatttgactggatttacatcttggtttcagaacgagtattcgataaggaattcaaagaggaagacaatattgagaaatgaatcaaaagggagatggatggttagagagagagagtgtgtgtgtgtgtaactcaagagcttgacttcggattcgagaaccgaattttgggacatttatttggtagcaaggaattagggatgactggaacgtcggttcggattgtctgagggattattgacaatagtcgagtgggatttaagacagaaattcgaatacaaaggttggaacttcgagaattatttcagtgaatcaaggggcgatgttaggatttacgaggtggatgctcgggctagattggtttcaggaattcgacgagatctttggtcagggttctagaagcgaaatccaaatacaaggattcgaacttcaaaactatacttgaaacgaaaatagggattctagtttctgaacttgaggtttgcaatcatggaaccttcgcaagaagtgaccggagatgatttgtgtgcaaactcaaatttttgaagaacaaaaggactaggatcatttgaagggtagtatctctgtagaggtttagaaaagagaatttgaatacaaggatgagattagtgaggcttttgacattagggatctgagacaaaggagatatttaaattgagatcaagtttccaaatataaaagaaatcaaggaattcgatattttttgtataggtttgtacttgggaacttgtaagattatttgggaggcatttgaagtgggatgtgagtccaaatgtatgactggaggaacaatatggggagtcaaggaaagaacatcaagatggaaacatgatatctttcgggatgggtttgtattttgtgggctcaacaaattatttagacggaatttcaaaggggagcgaaatcttgtgaggttgaatgtcaaatcggaaactcggtatttttggaatagatttgtgtttaggcttgatggactattttggcagatatccaacaatgaaggaaacaagtctcaaaagttggggttccacataaaagagttgaatttggatctgtgtttttgagatttgaacagatgcttggcaaaggatttcaaaggatgatagagcgataggtagagagattgcaaggataggagttgaaagcagatatcgcaaatctacttattcggagcgagtcaaaggaaggtggagagagagatggtggaatttaagaaatgcagttcgatttcgagagttggtttgaaggaaacccggggagagtttaggtctcagaggtgaagcatctgactgatttagggtttcaaagagatttgactggatttacatcttggtgttggaacgagtattcgggaaggaattcaaagaggaagacaatattcagaaaggaatcaaaagggagatatggttagagagtgtgtgtgtttaactcaagagcttgaattcggtttcgagaaccgaattttgggacgtttatttggtagcaaggaaatagggatgactggaatgtcggttcagattgtctgacggattattgaacttggacaatttcaggggaaattggtcgagtgggatttaagacagaaattcgaatacaaaggttcaaacttcgagaattgtttcagtgaatcaaggggttaggttaggattttcgaggtggatgctcgggctagattggtttcaggaattcgacgagatctgtggttagggctctagaagcgaaatgcaaatataaggattcgatcttcaaaacgatcctcgaaacgaaaactgggattcgagtttgctgaacttgaggtttgcaatcacggaaccttcgcaagaaatgaccggagatgatttgagtgcggactcaaattttttaagaacaacaggactaggatcatttgaagggtaatatctcggtagaggtttagaaaggagattttgaatacaaggatgagattagtttcggacagggatttttgagacaagggaggcttttgacattagggaattgagacaaaggagatatttaaattgagtaatcaaaatttcataggcaagattaagtaactaaagcaaatgaaaaaaagacaacctctgaatatgaaactaaaggacaataggttatcaacgattgtgaaaagatggattatttatttagcattccaaattgatactagaattgaaatccctttctgggcatgcagtcaacacaattcattcacagctcgtattcttcagattcaatgtgtaattaaatttcatgggcaaagatcaagtcatgaagaagaagacatacagcaattgtggctcggctaagccggtgtggtactccagaagatcgctccatagtgggctcagggcaaggcccaagggtacaccgagcagcgtagacggcagcggctgctatcaccgatgtcatgtgctccagctgcattgacagaaaaaagaatggcacattacaacagattgaagatgtatagcatcagcagaagaacaactgaaaatggactgtgcatgttagttacctccttgtcacccaatgcagctttcaggtatcgaaggatgaacatgtacattgtcggaacagtcaggttccactggagcttgttaagtatggacttctctgtgctcagaacctgctgcctgctgaaggagttgtctgatatgacaaggaagtccttaaactacaattatggcagctcaactgtaagacaagaagcaagctgaacatcatgtgcaaattgaacagcattgaacataatagcaagctgaacatcgtatgcaaattgagcagcgctgaacacaatagcaagctgaacatcaaatgcaaaattgaacagcatcagtggaagaatccttaccaatggagcccaagtctcctcatacttgcaggctatcaacatggcgcttactccgacaagctgcagctcattcctggccacattctccagggacaggtactgatcaattatgtagacagtgaggtacagggtctccggcatcagcataagcctgtagtgcacttcgatgagccaatcagtcaggattgctctcattctctcgttgatctcggtctgtgacaccatgtaggtgcagagaggccggtaggtgttctggacgaatcaagaagcaagagtaatcaatcactaatcaccaattgatttggcataagcataaaagaagaggaagctaagctcacctcagtgctcctgtagaatctgtagatatcttcgacgtaatcaatcactgccagctcgttgtgagcatcagatgcatcgatgtcgtatatcagctcctttttcgggctgatcacaccgccagaagcctgtgttcagaacaagttcagcaaaagaagaacaaaaaagattcttcagacaaaaattcctaacattcgacagaatcaaacaacacataccctgctgcacttggtcagaatcgaggtgagcgtttggattggtgccctccgggaggctgctctctgggctggacttttcttctgtttctcggagtccgaactgatcacgatgacttctggcttagccttgttgttctcgttgcgctgcttgattggtttcctgcacttgtcagctgctgctggagccttctggcgattaacgacaggcagagcagcccggccattgacgagattactgacgtcagcgagggctcgacggattcctggtggttgctgagcaacaaccgttgtgatctttggcctcctgacaatcttggcagcgtctgcacaaagtcaaaatttcagatcaggaacacataaagcacagaatcgccaagggagaaatcttgtacggaaatttaagctcagacgaacaagacgaaagcacacgcatgattcaagcaggctactaatattacagctcagaacaagaaacgcgattcattaggtgaaatgcaattttgggaagatgccagatttatccaagcaaacccaaagaacaacgcagaaaccatttctatgccaaaattgcgatcaattcaagaaatctaccaacgcgacaaacatctgcttccactacgggcgcatgcgttccgatcaaattctgggaccaaaaaataatccacacatgaacaggattttcaaaaggcgctctatttacgccgaatcagaacaagaacccgtatcaaatccatacaatttcacaatgaagcgtcgatcggacaagaatccgtaaaagaacccgcaagaacacatcaccgatcccaagaatcctaatctccagcgacgggagaaacctacgaacgcaaagcaagcacgcgacgtatcaccaccctcaaccacaatagcggcaagaaaacccctccccaccgccgcaatgaaacccccaccaaacaagaacacagcaaagaacgcgagctttatccccccgcaaccacaatcgcggcaagaaaaacccctctgtaggggcagcaagaggctaaatgcaattttggccgacggcggcagacggcgcggtcgacccgctgtctaccacgtcagcttgccgcccacctctggggcagcaaggggctaagtgcaattttagcagcccataaagagcttggggctcgtactttttgcatttgggccccttgccaccccactagagggcggcaagggacccagatataaaaattacccccaaatgatttttctatgttatgttaataataattaaagaagtatttattggtaaaacttgttaatattgttataaaaatgtattgaagttggttatttcgcaatttcatatgttaagtaaggtattattttgtaacttattcgacgtattagtacttggataattgatataggcctatcgcagtctcggtagtagaaacattatatggacttaaacaaggagaattatgtaacatgaagaaatagtagtacaatttgaatatgatacaactatttccattgcggttacatagatgatattagattcgaactaggagggaggtagtgcaatagttgaacacaacaacaatgtagtaatgggacaaggaagcatgacagtagaaatttcaatatgccaagttgtccgataatagctaacccctacgtgaggatccctctcctctctcaaaccgcgctttattaaccctgtattgctctggtagttcaagctgcacaacacggctaggtggagttagaacccttatggtgtctatccattctctgtattgacatctccttggtggttcctgggaggaaagaatagatgtgaagcgagcaaagttagtaaatgttgtcagaaaataaggattcatgtaatcaaaatattcttaccatgaaatcgtcgtcaagaatatttggacaaacaaagaaccttcgacccaatgttgtaggctttatggaacgaagaacctgacaacgatcaccacacctgcatcttgaatgggcttcccatggagggagtgccgtagttagcacccgccagtcgcactgttgttcacgacattatcgttcgtaagccgcttttctctgtaagtattgctcagtactttcggatgcgaaataccagcgaccttcttgtaaacaagtggttaggtcgagaacgggattttctgtatagacccactcgatgtatgcacaagccgtagtgcgggtctgccgaatagagtagtgttacgaagaataaaacgattgcccatacggaatgaataagcatatgcagatagtaaaatacctcacggtcatagttagggcacctaaaaaagtgtcttcctcgaatatcaggattcctcgaagccattagttggcatcgatcaccgcataggcagagaggacgctggcaccaaggtggtagtaggtatacacaaggatcgctacgccagttcggatcctcaatgcccaggtgtctagccattgacgaaagccggtaggatttgtaatgaagcaagtggggaagagagtcctgaatgtgactgagttctgaaagattgtgaggcctcgctcgttaaggcgacttatataggcaccaaaaatcgagtgatatccctgacatgtgaacgtggtggggcatggtgggtacgcctgattggcgccgaaagttacatgtctgattggcgccgaaagttacattggtcgtatgcggcaaatggcgggcaaatactcgtatcgcacgcgaataaaggaggctgcatcggtgcagcaaaaagtagtcatgcatgcgccgaaaggtatcgtgcacatataacaacaacgtattcattacacaagcatacagtactagcatgtgaagcaaataaacaaagagaagtctgctctactggccctgccccgcgccgcgaccatgcttggtcctccgggcctgtgctcgcacgtggtcctgggagtaggtgaaacgatccggtggcacagcacaggtagcacgattgtctggcggcggagtggcctgcgcctggtcctacatctgcaccggcgtgcgcctcccagctgtgaggggctgatgacgtcctctgtcaatcctgaagcgaagtcgaagtcagtgatgtcgaagagcaaggcggaagccaccaagtggtccagtggtggaccctgactcgacgtgccggctgcctatgacgaagtcccggtgtactgccagaactgcactgagtgtgaggtcgacgcagctgcctgagacgctgaccctgcagcctgggagaagtgggcggcctgcgtcgtagcgaactgggcgaaacctacacatcaacaatgggacccttgtaagctaagacataaaatgcatgtaaattgattgtcgaagtactgttgtttttttaagtacctgtggggggcacaacagaaggcctagccgaggaaggcggggtgctgaatggtgcacgaaaccctgaagcaatcggatgaatcggctcacatagatgtgcgaggcatgtacaaaaaaatccttaaaaatacttacctccatgcggagggggagacggcctaggaacgtgcgcagctggacggggaccagtcggtacgggtagccgctgtacagctgtgtctgcccgagcaatgtcgtctgcacgacaggtgagcactcggagaatcgagcgcatcgactccaccatccgtgtgtacgttgccaggtgctcctctacgggtaccggaatccccgcgcctaaacgttggatcgtcattgaaccgtcaacgacgaccctgttgatgtcgtcgacctgcatggttaatttattcgtacatattcgtaaaatttgacgaagagaaagatctgaaaacataaaggaatggtgcgatgcagggtactcacagcacgagcgaagtcctggtcgcggtgcctggcgtagagctctctagtgctcgcaacgtgggcctgctgctccaagggagcgaaggtgaccctagtacgggtgcgtggctggtaccagcgtaggtagccctggtacgcctcctcagtgtgtggctctccctcgtggtccacgacctcctcggttgcgagcaaccagtcctcaacaaaagtcaccaacttggcgggccagttgccagctgactgttgacccttgcgcgagtacctacgaattaatgtgtcatattagtgtcaatcgacagatgttgcaaattattgtggacaggtagattgtaatgcaacaaatcaaagcgtagtgaaagatcttaccggtgaacagcagctgggacggtcgtcggaaacggtactggaaagggctgacggaagccgaactgccgcatcacgcgaaaaggggcgtgaggctcaacgcagatgtcgaagaccatcggaaccgtagtcatccagtacgcctggtcccttgtgcagagtgtggacatacccaatggcacacgagcctgggtagccgtggcactgtagggctcccacacgacgtcagtcggctgaaggcggtcgaactccataacaaactcaggatacgaccgcttaacctagacgtgagcccatcggcgctgcaatacgagacgatcgatgtgatgtacaatgaacttagcaatgaacttaacaataagagaagatcgatgcaacgtacctgacgacggcaccacagagtacccatcgtagggtagtcgacctccggtcgctccgcgcacagtgactcctcgtatgcgtgctggtccacctcagggcggccgatcgcaatcctctcagctgcccaaatagaaagaaagagagggcacccaccaaaggtcgcgctgggatccgtcttcgtgtaaacctcacaaaggccacggtacagagccgccaacaacgcggaaccccagcttcactgaggcaccttgcctactgcggcgtcggcgatgctcctagcgtagtgcacgagtcccttgtcgacgcgtgcctgtgaccgccacagaaaatcacccagccaaaaaggcagagcaagtacgcctccaaacagcggctgtaggagtactcgtcggcctccgcctgtagctgctcgacctgcaagcgttcgataaaatgttaggcaccttaccttacgactaaatatgtagtatgcttgtcatttcggtacaaaaacactcacggtgaactgaagcagccacctcttcgtaggtccgatgttgcagtggtgtgccaatggctggagcgggagatgtggtgcgcgctatactggtgcgaaacgtgccgtcagatcatccttccagtccacacccgtggtcactggcccaacatcgtctcccgtgagcggtagccccaacaagtacgatacgtcctgtagggtagggtctacctcaccgcacggcaagtgaaaagtgtgcgtctctggcctccatcggtcgaccaaatctgctaggagggaccggtccacattccagcgtctggccgggtccgcgttgccagcatcatcctccaccagccgacacatcggtaggaggccggcctcacgcaacctacaagaacaaattaatatgtcattatgaaaattattacagtgcaactaatttatagtaatacactgttcgtacctctcgacaaaggagtcgtgaaccgtaagtagatcaccacacgtccgtgcctggaacgtcccaagctgagccccctgcaccgcagtaagatgagaccggtgtcggtgatctatcgccgggtccaacaactcaggtgtatcctgacgtgccatctctgaaaaatatagtgtttcatgttagaaaaatacaaaaagtagtaatgtagaacaaaagataacttgtaaaattatgaaaaagtaataaaatcataagaattattatgtacaacaagagtacaggctatttaaatatagcaaacgttactaagggtacataacgatgacgtgcaatttaacatatatgtagagttcgataatataatataacataacattacattacatgtcgaagtccgacattacatcaacatacctaaagacacaggtgcctaagtctgacgttacatcacgagacctaaagacatgacatgccgaagtctgacattacacgacgaaacataaacacatcgataagttcgaaacaaattacaagcaaagccacatgccaacatagaacacaagaactacaccatgtagccagacgtggcacgacgatgcctaggacgtggtcgagtggaggtagtgtcttcacccgtagggcgagctccttctgctactgatcctgatagtcctacctccgtcgcacttggtttctccttgtctttaggacaatgcttgtaggtgtgcccacgttcatcgcatttgctgcaacacttcaccctaccagcctccgactcgtccatatcgttgcggatgcgacgagtcttcctccttccagccttgcctcagagcttcgatgggtcagaaatattgagtacttcatcgttagtctctgtgaactccccagctatgccgaacccataaatcttgccgctccatgtatgatatactgcttgcttactgaagtactgtgacacatatactgcatctggtatgccacacttcgttgcgacagcaatgacatgggtgcatggcctgtggagcagcttcggctttgcacaagagcaatgacatgtgccgtcggctttaagaacacactcctgcttcactctcttgcggtagatacccctgcctgccttatcttgacatagtatctcaaacctgtgctgttgggtaccttgcactagagctcgatgtttcatggcctttatacgcaactcctctagctttttctgcatgaaagttccgaataaaatgctgttgttcagcatagagggaagaactgcctggaaacgatccctaaaatacctgcatgtcccatgtaaaatgaactccactatgccaactagtgggagtccatggacaccgcgcatcacccagttgtaaacttctgccaaatttgttgtcattattccatatctagcaccacttgtgtcatacgccttggcccatttctcttttggttcatgcagaatccactgagaaaatttccgaatctccactccagttcttctaaccaatgttggactatccattgggagaggtccaagagcttgaggagggtcagcaacggcggtcgatggagccgctgcacgctgatcactgcatttggctgtcaactcatctaatctcttccaaaactcattgaattttttctcctggttctgattgcatagcctcttgaacatgttcatgagctccttgttcttgaattgcttgaagaaattagctcccatatgacgcatgcaccacctactctgtacatcttcccactcaccagggtatcctcgttccatactcccaaactgcaactcttctatcgctcgcagaatgccagcgtgcctgtcatgtatcaggcacacatttggcctcatactaataacttttgttttaaccaatttcaggaaccagtaccagctgtcggtattctcactctcaacaaaagcaaatgccaagagcaatacctgattgttcccatctacccctattgctgttagtatctggccccgatactttccagtcaagaatgtcccatcaatgcagagaacaggacgacagttcacgaatgccatcttgcatgcatgtagagctaagaacaccctttgcagcacactcttgccaggatgttcaattgaggggaatttcttcactgcgtaagagctcccagggtttcttccttcgataacaccaagcaggcgtggcaaattgtcatacgaggcttcgtaagttccaaatctcatctctattattttctgtttggcccttcacgccctggcatagctaatagtatacttgtatgtctcttcgatgtgtcggattattgaccttggttcatatgtgagattatcgatgacatgcgcatacatctcagatgcaacaaatgcacatgtaatgttcctatggtatttctgaacaccaggtagaaaacatgtatgcttggtaacgactgacactgtccaataatccttccattttcccttataagcgtgcactctccagggacaaacatctttttccttaacacactgaacttcatattgcgaccggttggacttggcaacccaaaactctctatgaagtgacactgcaaaatattttaccacctccttcatatcttctactctagtataaatcgctccctgaataatgtagagcccgttccgtcgtggcgcctagcgagaaaattatctcttaaaaaccctaattgcgaaatttgtttctttgcttgttgtctagtgtccgtgccatctcaagatctcaatctccgatctatcgtcgagttcaatcccgaatccaaatccttccaaatcaatctcctccgcaaaagtctattttgcctcccccggggtcgatgggccgaatctctctcggcccatctccccctccctcccccggcgctctctctctctctctctctctctctctctctcttccccccccccctccgctccgcccgcgcgctgcgcgcgcgtgcgcgggagccgcgccgagcgcccctccccctccgctctgcccgcgcgcgtgcgcgtgagtagcccgcgccgagccgagccctcctctccgctccctcgctgccgctccccgcgcgtcgttcgcgcgcgcgcgcccgcgtggtcgtcgcccgcgtcgcgtctgcgccgcccggacccgctgccctgccgcgcctgcagccgcgcagccgctcggccccgcagccagcgcacgtgcccgagccgcgccactcaatcagccgcgcctcccgttgcaagccgcgcgcgcgtgccgtggtggccgaccgcctggtcgccgccgtcgtcagcgcctgcccgcgcctgtcgcccatgtcgccgctccgctccacaccgccctgccgtcatcgcctcggccccgccactcctcgcgcaagccgccaagggacggaggcagagccctcctccctctgccgcgtcgatctctctccccctcctccttttccccaaagcggcaaggaggcaagccccctttctctccctccttttccccttttcctcccgccggcgtcatcctcccgccattgccaccacctcccgtgctatgtctcgcctccgccgttcatcgccaagcaccgggagagccggtgcgttcgtggacgcggaaggggactccgggcgctcgtcttcctcctcttccccggcccgaggccggagagattagtcccgctccgtcggcctctcgtctctgcgccccacctcgtctcggtaatgcctccctccgttcttcctcctcgctccatctcccccccttagttttcggtagtagcacgagtagcctccccatagctagccggcgccgccccgaccgttgccgccgctcgccttgtgctcgccgccgtcgccgcccgtgctccgtagcacccactcgtcgccggcctcgctcggcgtagctccgcccaatccgacgctagcaacggattcccgtggccgcgtagatgctctcaccgccgggaattggcccctcgtgacctcatcgccgtttccccctttcctctccgccgggcgccgccgccgcaatccgccgccgacggactccctccggcgaatccaagccgttggctcgctccctctctttctccctcgtcatcccggtgtacgccccgtcgcccctcatcgtcgcaagacgccccggagaaaccgccgccgcacgccgtccattcgcggccggcgccttcgtcttcctcccgccagcccgcgtggcagccacgtaggtgccacgtcggcgccagctcggccgagatcgggtcgggccgaccccggtcagccccctcccgtgcgcgcgttccaccgcgagccgtgaggctgcgcgtgggcccgccgcatccgtttcaccacgaaccacgcgcgtgcaccgcatccctttccccgcacacgcgcgtgcgccgcgtgctccctccgcacggtgagccgagccgctgacaagcgggtcccactcgggaccgcgcgtggtgagcccggtccaccggcgctatctctcctcccctcccgcgcgcgcacgtcttgggccgccttgggccggccggcccatttagctcggccggaccgccccaattctctcgagccgcgccctagccgccgaggaaaagtctattttcccttcctcttttcttttcttttcttttcttttccaaaaagatttaattaaatccttttcctttagaccaaaaatccaataatcttagaaattcaatatcttcccaaccataaatccgtttgactccgttcaacttccaaaattcctcaaatctcgagatctatctaatggcacgcttagaggtcattaatagggctttattttcgccgtttgttgagttgtcccgtttcgcgtgtagtttcggagcccgaagacccgcagtgcgaagatttcgaggatcaagctccagatctcgagcaaggcaagccacctttgaacatcttgagcctatatttgaaatttaattatgttgcttgaaaaatattatgcattgataggatcgcacttaatctgctgtcccgtctgcaaggcagattggcggacctacctaatttggtgcatttgatccttcccttgataattgttatatcatatccccttgtaaccttctagttgcgtctcgatattcgtgcaccctgtgcgagtatcgacggacgtcttcaaacttaaaatctgaaaaacttctagggtaaaacttgggttttacaaaagacttggaaaacccgacacctgggtcggtgcttgtgaactaaatgtagttccaaaaccacggaccggggaacgtaccgggtgtacggtttcccgctcttgcacttaaggaccgtttccttggaatttcatccaaacataagacaagtacgaccacatgggtggaatgggacacccctggctgagtaactagcttatcaggggagccttgatgccgagagacatgtggattcgctggggtggtgtcggggagaacccctaggcttcctggcacagtaaggtctgggacctaacctgttgttggtctgagacccctctcgtcggcatatggtaaacctatgtcggctttggaaatgccttgtcatgaaagcttggaggtctcccgacgtggctgatccccacgggctgggtgatccgggttagtaatgtcgtgtgggtaaagtgtaccccctctgcagaggttaacaaacagttcgaacagccgtgcccacggtcatgggcggatgtgaggtgattcctagcgtagttttgtttgactactgcttgtgaaattgctgttgtggaaaggggttcgatgtttgaaaaatctgcagctgatgggatcagctaggcccgggtggccgtttgaaagttgttggctcgggtggccatttgaaaagctgttggccgggtgccaaccttgtttcgattctaaagactgatacattgcactcacttagttgttttcagaaaagagttcaaataaaatcaattgcaaaaacaacagcccttccttgaagcctgcattaaacacttatttcccttggcttgctgagtactcccgtactcacccttgctctatataaataatcccctcccagttgctgaagaagatgaagcggatcctgctgatgaggagttcttccaggagcaagccggctatgatgagttttagggtttcggcctagttcccaagtcgcgcctgtgttgtttggtcctagtcctggcttccgtttcccttttgtaatgcagttgtgagctcgggatctgtccgcagcccaacatgactgtacctctactctataataaagagacctctgttgctgtgataatctgtcttcctgtgataccagcactgtgtcctgggactggtatcgattaacaggttaatttggagcgtcacgggctagttccggtcagtactagttcggggcgtgacaagagatggtatcagagcacaagcttggccctagggcgaaacccgacgtttaggacgaccctaaggatactaagttcaaaactacttgcgaaaagctaaggcttcttttggtttccttattttcaatagtttgtttctaaaatggttactgatcttttctccctctttcaaaattgtagatggcagtgaacgccagcttcagctcccacggttttggtgagggtcaccacgtcgctcagctccgtgacctcgcccgtttccttggcttctcgtgtcccgagcacacgggatactccgtggaccgtgttccccctcgctgtgagctctctgtgtacctttaccctcgtggaggtatacacggagctggccttcgcccacaccacttcaccgtggccaggcctactctccagatcgcgtaccaggacctctcctggactgcgcttcgtcgcctggcccacgactacagccaccgcctcaggggctctgccttccggcagcttccacgccttccttctagccacgcagacgccagatacccttgtccgtacagcgagtctcagccagtgctgactcgcatggttgagctttcggaggctcaggccactcagcacgacctatgtagcgcccgttccgtcgtggcgcctagcggcaaaaattatctcttaaaaaccctaattgcgaaatttgtttctttgcttgttatctagtgtccgtgccatctcaagatctcaatccccgatctatcgtcgagttcaaatccgaatccaaatccttccaaatcaaattcctccgcaaaagtctattttgcctcccccgggtcgatgggccgaatctcgctcggcccatctctccctctcccgggcgctccctctctctctctctctcgccctctcccctccccggcgagctccgctttcccccccccccccccgctcagctccgctccgcctcgcccgcgagccgcgccgagtgctcctcctcctccgctccgcccgcgcgcgtgcgcgtgagccgccgcgccgagcgcccccttcccttctcctcgctctgccgcgcctccgtaagccgcccgcgccgagccaagtcctccctctccgctccctcgctgccgcttcccgcacgccgtgttcgcgtgcgcgcgcccgcgcggacgccgcccgttgcaagccgcgtgcgcgtgccgagtggccgaccgcccggtcaccgccgctgtcagcctctgcacgcgtctgtcgcccgtgtcgtcgcgccgctccaaaccgcccgccgtcatcgccgtcgtcaccgcccggcccccgccactccgcgcgcaagccgccaagggacggaggcagcgcccctcctccctctgccgcgtcgcccccgctcccctcctcctttttcccgaatcggcaaaagggcaagcccctttctccccctcctttttcccctttcccccccccccccccggcgtcatcctccctgtcgccgctttggccgcgaccgccgagcgccagctagcgccttgaccgccctaagtcggttcccaaaccgaaattgccgccccctttaaaccccagctccttcccctccaatctccctcgttttcgcctcctcgccatagctaccgcccccgtgctctgttcgccgtcgccgttcgttgttgcgcgtgtcgaaggagtcggcacgagcaaggacgcggaaggggacttcagccgcgccctctccttcctcttccccggcccgaggccggagagattactcccgcgccgtcggcctctcgtcacagcgcccctcctcatctcggtgatgcctccctccgttcttcctcctcgccccatctcctccccctagctttcggtagtagctcgagtagactccccatagctagccggcgccgccctgaccgttgccgtcgctcgccgcgtgctcgccgccgtcgccgctcgagctccgtagcacccgcacgtcgccagcctcgctcggcgtagctccgtccaatccgacgctagcatcggattcccgtggtcgcgtggatgctctcaccgccgggaatcggtccctcgtgacctcgtcggcgtttccctcttccctccccgccggttgtcgccgccgcgattcgccgccgtcgaactccctctggcgaatccgagccgttggctcgtctcccctcatcacgaacaaccgcccggtgtgctagcttttgcccgtatcgccgtggttcgctccgccgctcgccgccgccgcccgccgtccattcgcggccgggtcgtcgtctacctcccgccggcccgcgtggcagccacgtaggcgccacgtcggcgccagctcagcctagaccgggtcgagccgaccccggtcagtccctccccgtgcgcgcgttccaccgcgagccgtgaggctacgcgtgggcccgccgcatccgcgtccaccgcgaaccgcgcgcgtgcaccgcgtccctcccccgcccgcgcgcatgagccgcgtactccctccgcacggtgagccgagccattgacaagcgggtcccacccgggaccgcgtatggtgagcccggtccaccggctctctctctcctccctcccgcgcgcgcgcgtcttgggccgccttgggccaccttcttgggccagccggcccgttaagctcggccgagccgccctttctctcgagccgcgccctagccgcccgagggaagtctatattccctccctctccctttttcttttcttttcttttccaaaaaggatttaattaaatccttttcctttagaccaaaaatccaataatcttagaaattcaatatcttcccaaccgtaaatccgtttgactccgttcaaattccaaaatttctcaaatctcgagatctatctaatggcacgcttagaggtcattaatagggctttattttcgccgtttgttgagttgtcccgtttggcgtatagtttcggagcccgaagacccgcagtgcgatgatttcaaggatcaagctccagatctcgagcaaggcaagccaccttgaacatcttgagcctatatttgaaatctaattatattgcttgcaaaatattatgcattgataggattgcacttaatctgttgttccgtctgcaaggcagattggcagacctacctaacttgttgcatttgatccttccattgttaattgctataccatgtccccttgtaaccatccagttgcgcctcgatattcgtgcaccctgtgccagtatcgacggtcgccttcaaatttaaaatctgagtaacaacttgggtaaaactggagttttacaaaagacttggaaaacccgacacctgggtcggtgcttgcgaactaaatgaatttccaaaaccgcgaaccgggaaacgtaccgggtgtatggtttcccgctctcgcacttaaggaccgattccttggaatttgcatccaaacataagtcaagtacgaccacatgggtggaatgggacacccctggctgagtaactagcttatcaggggagccttgatgccgagagacatgtggattcgccggggtggtgtcggggaggacccctgggcttcctggcacagtatggtctttgacctaacctgttgttggtctgggacccctctcgtcggcatatggtaaacctgtgtcggctttggaaatgccttgtcatgaaagcttggaggtctcccgacgtggttgatccccacgagctgggtgatccaggttagtaatgtcgtgtgggtaaagtgtaccccctctgcagaggttaacaaactgttcgaacagccgtgcccacggtcatgggcggatgtgaggtgattcctagcgtagtttggtttgactactgcttgtgaaattgctgtgtgaaaagggggttcggtgtttgaaaaatctgcagctgatgggatcagctaggcccggatggccgtttgaaaagttgttggcccgggtggccgttgaaaaagctgttggccgggtgccaaccttgtttaaattctaaagactgatacattgcacatactccgatcggacgagacgcactgtctcatccgtgtcgtttgagaagcactcacttagttgtttcagaaaagagttcaaataaaattaattgcaaaaacaccagcctttccttgaagcctgcattaaacacttacttcccatggcttgctgagtactcccgtactcacccttgctctacataaataatccccccagttgctgaagaagatgaagcggatcctgctgatgaggagttcttccaggagcaagccggctacgatgagttttagggtttcggcctagttcccaagtcgcacctgtgttgattggtccaagtcctggcttccgctttccttttgtaatgcagttgtgagctccggatctgtccgcagcccaacatgactgtacatctactctataataaagagacctctgttgctgtgatattctgtctccctgtgataccagcactgtttcctgggactggtatcgattaacaggataatttggagcgtcacgggctagttccggtcgggactagttcggggcgtgacaacctacaggataatttggagcgtcacgggctagttccggtcgggactagttcggggcgtgacaacctactccttgaagcgtgttgttggttcttccaccgtgctccgtttcctcccgccgtggcccacgctttatccgcactgcgcggaagcgtgttgttggttcttccaccgtgctccgtttccactacccagctcccccaccgccagcggcccgtgctgctgccggccctcgacaggttccgccggtcccttcgcgtcagccgatcgacgtttcttcgactgaggagccgactacaggaggcagccaggccgacgaggagtagaggaggcagtcttcagcagccgtccatgtgataggcccttttgttccgccgccaactcttttggagtcgtggcgaggtagtgcgtgcgtgtgtttgttgtgggtgttgtttggtagtctggttctcctaggtggtgtgcgcacagtcaagctcggcgtagctctgtgacttgtccacacccgttgtatcaggtgtttttatgatttgaaaaatccagtttatgcctagtgtgtgctatctgagttgctaatttactttgctccttgccctcctaagtgcttatctaactcttacctcgccctcttctaggagtttagatggctagccgcccccgccgtgcagctcgtgcaccagcccgctttggttttgaagatggtagagtcgagccagaagcaaatcatgagtcagctaatgagcggtctcaccacagcaaccgttcgcaccgtactgcttcccgcaacgcagaagttgagcaacctcgccgcagcaaccgctcgcatcgcacagcttcccgtgatgcagagattgaacagtctcaccgctctcaccgcactgccagtcacaattctggagaagaacgcctcccttccccacctcatgtggaaaacaacatgcagcacctgatggcagttcagacacaaatcttgcaaggattagccgcagccgtagctggttttcagcataatgcgcatggaaatggccaccctcacacgaataacaatagatccaagctgacagattttctgaggtctcgtccgccagagttctctcagaccgtcgagcccgtcgaggctgacgattggctgaaggatgttgatagaaaactcaacttagtgcagtgtactccggttgagaagacgctctacgcctctcaccagctaagaggacctgctgcagattggtgggagaattactgcaacgcacaccctgaacccactaacattgcttgggatgagtttgctacggctttccgtgcagctcatgtgcctgaaagcactattgacatgaagaaagaggaattcaacagacttaagcaaggcaacagcagtgtcaatgagtacctaagtatgttcaacaagttggctcggtacgcccctgaggaagtggacacagacaagaagaagatcaggaaattcttgaaaggaatcgcagttggaatgagactccagttgcttgctcatgacttccccacttttcaatatatgatcaacaaggcacttctacttgaggatgccagaaaagaggctaccgaagaatacaagaaacgcaagtctaaccatcagggaaattcttcccgaggcgcacctcaccctcgctacggtcaacccatgcaataccaccagtcggtcactcaggctaaccgccagccaggctacgcccctcgtcctcagatgaaccgtccggcacctcagccacagcagcgtgcccctagtggcaatactgcgccaaacagtgttacctctttcaagtcaccgcagggaccaacaacagttcagtgtttccggtgcgaccagatgggccactatgccagacagtgccctcagaatcctaccaacaccaactcagggcatgctaatggcagcactgccagaactcctactccagcggcagctcagtttcgtcctagctctcaggcaagtggacaaggttcacgtgcttccaacaactttggtcgaggccgggtgaaccacattcaagctgaaaccgctcaggatgctccagacgttgtgatgggtatgttctctgtcaactccgtacccgcgatagttctgtttgattcaggagcttcccattctttcatatcacaagcttttgtgaaaagaaatggttggaaacccaaaatttacgtgtaccaatgatagtacattcccctgggaggaatataagggcaactcaaatatgcccggaagttaaccttagaattgaggaagttgacttcctagccaaaccgatagtcctagactcgcaaagcttggacatcatcctagggatggattggttcgctaagcacaaaggacagatagattgtgccaaaaagtccatcaccttgcaaggacctggaggaaagcaagtccgctttacctctaacacccctaccgcaagtcggtctatcctaacctgtttacaagtcacctccttggagtcggtgcctatagtctgtgaatatcccgacgtatttccggaagaattaacgagtatgccaccagaccgagagattgagttcgccatagaactggcgccaggcactgcaccaattgcaaaaagaccctaccgaatggcagctaatgagttagcagaagttaaaagacaaatcgaagagttggagagtaaaggttatgtgcgacctagctcatccccttggggagccccagtgcttctggttaagaaaaaggatggctctgagagaatggtaatcgactatagagccctgaatgaagtaactataaagaacaagtacccgttgccatggattgacgacttgttcgatcaacttaaaggagcaagagttttctcaaaaattgacttgagatcaggttaccaccaactgaaaatcagatctgaagatatcccgaagaccgctttctcaacgcgttatggtctatatgagttcacagtgatgtccttcggactcaccaatgctccagcgttcttcatgaacttaatgaacaaaatctttatggattacctggaccagtttgtcgtggtgttcatcgatgacatcctgatatactccaagaacgaggaagaacatgccgaacacctgaggctgataatggaaaagctcagagatcaccaactattcgctaaattctcgaaatgtgaattctggttagaccgaatagcatttcttggacacgtgatctcctccagtggtgtcgaagtagatcccagcaaggttgaagctgtacttgcttggaacccgcccaagaatgtgtcagagattcgcagcttccttggcttagctggatattatcgaagattcattgaaggattctctaagctagccagacctatgaccgagctgttaaagaaggaaaagaaatttcaatggtctgcagcctgtgaagacagctttcaagaaatgaagaaaaggttgaccactgccccagttctcaccttgccagatatccgaaaagatttcgagatcttctgtgatgcatcaagacaaggcttaggatgtgtcctaatgcaagaacgaaaggttgtggcctatgcatccaggcagctcaggcctcatgaagtcaattatcccacccatgatctcgagttggcagccgtggttcatgctcttaagatctggaggcactatttaatcaggaacagatgtgaagtatacaccgatcacaaaagtcttaagtacatcttcactcagaccgagttaaacatgaggcagagaagatggctggaactaatcaaggattacgatcttggaatccattaccaccccggtaaagctaacgtggtcgctgatgcgctaagtcgcaaggcctattgcaatgtagctcaaatacggcctaaccaagaacgcctgtgcagagaattagagaagttaaggctgaccgtggtacagtcaggtgtccctgccagcttgacagtacagcctaccctagaatcgcaaattcgggaggctcagaaagatgacgaagggataaaagagttaataaaaagaatacaggagaagaaagacaccaacttctccatagacgatcaaggcacagtttggtgcggtccacgcatctgtgtaccggccaagaaggagttaagagatatcatcctaaaggaagctcatgagtccgcctactccattcatccaggaagtacgaagatgtaccaagatatcaaggcatacttctggtgggctggaatgaagcgagatgtcgcagaatacgtagccttgtgtgacatttgccaaagagtcaaggcagagcatcagaggccagctggtctgctgcaacccctaccgattcccgagtggaaatgggaagagatcggaatggatttcatcaccggtttgccaagaacccctagcgggtatgactccatctgggtaatcgtggaccgactcacaaaatcagctcatttcgtgctagtgaaaaccacctttgatggaaagaaactagcagaactctacatgacccatgtcgtatgtagatttggttgtcccaagaagattgtgtcagaccgaggcactcagttcacctcaaggttctggaagcagttgcatgaagccctcggaaccgatctaaactttagtacggcctaccatccgcagaccaatggtcagacagagagggtaaaccaaatcctagaagacatgctacgtgcgtgtgccctggatttcgaaggcacttgggatcgttgtttgccgtatgctgagttctcatacaacaacagttatcaggccagcattcagatgtcgccgaatgaggcaatgttcggaagaaagtgccgcactcccttgtgctggaatgaggtgggcgaagcgctggtattcggtcctaacatactcaagtcagcagaagaacaagttaagctaatccgagaacgtttaaagacagcgcagaaccgtcagaagaattacgctgacaatcggagacgtgaccttgagttcgaaaaaggagatcatgtgtacctgcgggtatcgcctctccatggtataaggaggtttgggatgtccggcaagttagcaccttgctacatcggcccctacctcataaccgccagacgtggcgaagtggcttatcagcttgagttacctgaaggtctcgcagatgtgcacaacgtgttccacgtatcccagctaaagaaatgtcttcgagttccataagagcaagtccccctgggtaatatcgagctggaaaagaatctgacctacaaggaaagaccgatcaaggttcttgaagaggcagaacgtcagacccgaaggaagaccatcaagttctacaaagtccaatggagcaatcattctgaagatgaggcaacctgggagcgagaagatcttctccgcgccgagttcccggagctgctcccttaggtgatgaatctcggggtcgagattcttgttaggggggttggtctgtagcgcccgttccgtcgtggcgcctagcgggaaaattatctcttaaaaaccctaattgcaaaatttgtttctttgcttgttgtctagtgtccgtgccatctcaagatctcaatccccgatctatcgtcgagttcaatcccgaatccaaatccttccaaatcaatctcctccgcaaaagtctattttgcctcccccagggtcgatgggccgaatctctctcggcccatctccccctccctcccccggcgctctctctctctttctctctctcttccccccccccctccgctccgcccgcgcgctgcgcgcgcgtgcgcgggagccgcgccgagcgcccctccctctccgctctgtccgcgcgcgtgcgcgtgagcagcccgcgccgagccgagccctcctctccgctccctcgctgccgctccccgcgcgtcgttcgcgcgcacgcgcccgcgtggtcgtcgcccgcgtcgcgtctgcgccgcccggccccgctgccctgccgcgcctgcagccgcgcagccgctcggccccgcagccagcgcgcgtgcccgagccgcgccactcaatccgccgcgcctcccattgcaagccgcgcgcgcgtgctgtggtggccgaccgcctggtcgccgccatcgtcagcgcctgcccgcgcctgtcgcccgtgtcgccgctccgctccacaccgccccgccgtcatcgcctcggccccgccactccgcgcgcaagccgccaagggacggaggcaaagccctcctccctctgccgcgtcgctctctctccccctcctccttttccccaaagcggcaaggaggcaagccccctttctctccctccttttccccttttcctcccgccggcgtcatcctccctccgccctgtcgctgatttggccgcgagcgccgagcgccagctcgcgccttgaccgcccaaagtcggtttccaaaccgacattgccgccctttaaacctaggcgccctcccttcctctttcccccccccccaatcctccccgtttctcgtccgcgccattgccgccacctcccgtgctctgtctcgcctccgccgttcatcgccaagcaccgggagagccagtgcattcgtggacgcggaaggggactccgggcgcttgtcttcctcctcttccccggcccgaggccggagagattactcccgcgccgtcggcctctcgtctctgcgccccacctcgtctcggtaatgcctccctccgttcttcctcctcgctccatctccccccccccttagttttcggtagtagcacgagtagcctccccgtagctagccgtcgccggcctcgctcggcgtagctccgcccaatccgacgctagcaacggattcccgtggccgcatagatgctctcaccgccgggaattggcccctcgtgacctcgtcgccgtttccccctttcctctccgccgggcgccgccgccgcaatccgccgccgacggactccctccggcgaatccaagccgttggctcgttacctctctttctcccacgtcatcccggtgtacgccccgtcgcccctcatcgtcgcaagacgccccggagaaaccaccgccgcccgccgtccattcgcggccagcgccttcgtcttcctcccgccagcccgcgtggcaaccacgtaggcgccacgtcggcgccagctcggccgagatcgggtcgggccgaccccggtcagccccctcccgtgcgcgcgttccaccgcgagccgtgaggctacgcgtgggcccgccgcatccgtttcaccgcgaaccacgcgcgtgcaccgcatccctttccccgcacgcgcgcgtgcgccgcgtgctccctccgcacggtgagccgagccgctgacaagcgggtcccactcgtgaccgcgcgtggtgagcccggtccaccggcgctctctctcctcccctcccgcgcgctcgccttgggccgccttgggccggccggcccatttagctcagccggaccgccccaattctctcgagccgcgccctagccgccgaggaaaagtctattttccctccctcttttcttttcttttcttttcttttccaaaaaggatttaattaaatccttttcctgtagaccaaaaatccaataatcttagaaattcaatatcttcccaaccgtaaatccgtttgactccgttcaacttccaaaattcctcaaatctcgagatctatctaatggcacgcttagaggtcattaatagggctttattttcgccgtttgttgagttgtcccgtttcgcgtgtagtttcggagcccgaagacccgcagcgcgaagatttcgaggatcaagctccagatctcgagcaaggcaagccacctttgaacatcttgagcctatatttgaaatttaattatgttgcttgaaaaatattatgcattgataggatcgcacttaatctgctgtcccgtctgcaaggcagattggcggacctacctaatttgttgcatttgatccttcccttgataattgttatatcatatccccttgtaaccttctagttgcgtctcgatattcgtgcaccctgtgcgagtatcgacggacgtcttcaaacttaaaatctgaaaaacttcttgggtaaaacttgggttttacaaaagacttggaaaacccgacacctgggtcggtgcttgtgaactaaatgaagttccaaaaccgcggaccggggaacgtaccgggtgtacggtttcccgctcttgcacttaaggaccgtttccttggaatttcatccaaacataagacaagtacgaccacatgggtggaatgggacacccctggctgagtaactagcttatcaggggagccttgatgccgagagacatgtggattcgccggggtggtgtcggggaggacccctgggcttcctggcacagtatggtctgggacctaacctgttgttggtctgggacccctctcgtcggcatatggtaaacctgtgtcggctttggaaatgccttgtcatgaaagcttggaggtctcccgacgtggctgatccccacgggctgggtgatccgggttagtaatgtcgtgtgggtaaagtgtaccccctctgcagaggttaacaaactgttcgaacagccgtgcccacggtcatgggcggatgtgaggtgattcctagtgtagttttgtttgactactgcttgtgaaattgctgttgtggaaaggggttcgatgtttgaaaaatctgcagctgatgggatcagctaggcccgggtggccgtttgaaagttgttggctccggtggccgtttgaaaagctgttggccgggtgccaaccttgtttcgattctaaagactgatacattgcacatactccgaccggacgagacgcactgtctcatccgcgtcgtttgagaagcactcacttagttgttttcagaaaagagttcaaataaaatcaattgcaaaaacaacagcccttccttgaagcctgcattaaacacttatttctcttggcttgctgagtactcccgtactcacccttgctctatataaataatcccctcccagttgctgaagaagatgaagcggatcctgctgatgaggagttcttccaggagcaagccggctacgatgagttttagggtttcggcctagttcctaagtcgcgcctgtgttgtttggtcctagtcctggcttccgtttcccttttgtaatgcagttgtgagctcgggatctgtccgcagcccaacatgactgtacctctactctataataaagagacctctgttgctgtgataatctgtcttcctgtgataccagcactgtgtcctaggactggtatcgattaacaggttaatttggagcgtcacgggctagttccggtcagtactagttcggggcgtgacaaataacctcattttctttgtactcccatctcacactatcctcttcagagacgaccagaccagaaaaatcctcactagcccattctgctggattaatatccgtctcatcatctgacgaatcaccttcctctacacgctcgttgtcagaatcctccctctccatttcatccacaatggcaccgacagtctccccctcgtcggccactccacctagttgaatgcccactggagctactacgcccccgtcctcttgtgcgttgacatctttcacagaagtctcatttacttcagcaattggtccctcgccatcatccatgttcatctgcacacctggatccttctggtgaacaaacggaaccatagctagaggccacccgcgttgcaatgcattttccacatacaatctccacactcgagagttttgaactggcattagttcccaataaaaaccctcagttgcccgacttactataacattgattgttatgtcacttatctgtggatcaactctcaagcccctcattaaccatccttttatagaaggtacactcctctcagccggtctatcaattccccattctgatacaataaattctgatagatctaccccagttggcccgtaacgaacgtttcctgggccatggggtaaacttggaatatttgtttgttcgacatatctgtcaacgaaataactagatcatattactctttcatgcaataaaaatctacaacataatatcttcttgtgtatgccaatgcaacggtaaagtactgattccaaactagcagatctatatagttaccgatatctacaatacgcacttctagattagtataactaaaaccctaaaaatataatgcatttattcgaacaaagtttttaaaaaatacacagtatttaactcaatagtcacatataggatctatgaatattacctgaaatcggcgtctgaatctggcagggcttcgccccttctcttttcctcccctttcttcttttttttactggatttgtgggggaggaatgagggctgggggctgggcggcaggccttttataggccgtgaggcctgccgcccggccagagggcagcaaggggccgcctgcaaaatggccggtctcggctggctttttttgcattggggccccttgccgccccaacagagggtggcaagggtttttctgcaaaaaaacctccctccgtcaccgcccgtccctcccccgtttgccacgtcagcttgccgccccggaggtgggcggcagggtctatttttgtaattattttggccaatagattatttctataaatatttaaaaaaaatctaaaaataaaaaaaattctaggcacggccatgctcggaccaaaatttatcgggctggcacggcccgaccagcacaccgggccgtgccatgctggcccacgtgctgaagcatgagagcatcgtgctttttcataaaaccgtctaattttcatccctgatttctttaggccatgtctgaattattgtaataagggcttgttcactttgatgctaaaaaaaaccttaccaaattttggcatatttgtcaaaattttggcagaatttcttatatagttactaaaatttgacagcaaactaaatgtagccacttttttagcaactttaccaaaatttggtaatgttgaaaatggcattaaagtgaacaggccctaagtctattttgtatcccttctcttgggccgtgaattatatgccttcattaagtctaatcttagtccctaaactacttttcttccctcatcattggatcaggacgtgcccagctgtcaggtcgggccgggccaggcactatcccaatcggaccgtaccgtgcctgggccgggccatcgggccttattgccattataggcgtggtaattcgataggggcaccttggaaaattttacgtttttcttgtgcacagcttgtcgaatgaagacggccgggcggcgagccacaaacccgctcccctccctcccatggccatgacgctctacaccagaccatgatgctctgtcggcgttccctcatcgcaacactccggcggctggcttgctgcggcgtggcggccgtcgtcgacgacaagttccatggcaagaaagagttcgggctaccactggctgggaaacttcaaggagttcttgtcaccggcctagaggatgacgacagccgaattgtggcagtgacggtcttgttttccggcgacggcgaggatcgatagcctcaggttcttcgggggtccatcgcgacgatgataccacggcgccaacggtttcgctgttgtcagtgcggctgacgcacatgaagctggcagaaatgtcagctcaaactcagttctcagtttcagagtgcatctgaaagtagaagagagcttgcagagctgcataacatatgatgtaaattaagatgagaacgctcacaagtctcaagactacagtactatgttaagcttgctgtactacaatagattggcagttgaacattagtgaattaaggaacatgattgaactgaatagcaaaaaagcgaatccgtctgaatacatttcacttgaatcaaatattcgtattacaattaggagctagatgaaaatttaaaaccaataacagctcctgatatacaaacctatacttctcacaagacttactaagattcataatgtggacaaatctatctatctatatgtaaattaacacctcagtgcgggggacctagatcgaattacatataattgaagggcttttcgtaaaatttccaccatggttgctatccgacgtggacaacgcgagaggtggcttgaggcgccggccttgaagaggttaattcccaacatttggaactatttaactgggaaaaaaataaaatcaagactttcaatatcaaactgacccttctgagagagagcgggatcgcttccctgtagataacgtattcggttgttcaatcattgcgtaacgcgttcggtatttatagtatggaggaatgctagattgccattccagggcatcaatgttctcatcaagctggccctttttggctataaaagcattgcttgtgggatgatcattgagccgagaggaacttgcttcattgtatgtcactggtacaaaccgatttaatttactaaaccaaactatagtccgcccacttttagctgcaaacatgtcccttggatgttcacctagtagacggaaatgccagtttgtgataattttcatgcgtttgagaaccttgtaccagaattgaacactaaaattagatctgagtatgccaccaataatgtttgcatgtaggaatgctccattggcctgggccgcgatctccatacatatggatgttagcttcggctcctcttcaggattagtgctgccaaatgcaattgttttcaagaaataccaaaaagcttcttttgggagcatatctaactgaagtgtttcggttgttccaaaagttgctatcttatttgattgacttgttattatgattttactcacaggcgccgctatgttgtctcctctcagactagacaatattcttctccatgtttcatcatccatgtcatcaacaagttcaattactactagtgattgtttagttgaggcaggattttgatgtttgatgacaccggtatctgcaactgcaccctcagtactaccggtgtaatagaaaacaatcgtggagaagtatttacgcaccctttcatcatggcagacattctcaacaagagtgctcttgccaactcttgcaggaccaattatcggaagcactgcaacaccttccgcgccagcacgatgtggttctagcaagaagctgatgatcctctcttgttctgcttgacggccaaacatgcagttctccaacaacaggtagctgcaataaggctgtcgaaccatacgagggtagcttctgagtgacataacaaactcctctgaaatgatgctttcaaggcgaccaagcatctttagaagctcttttttctcctggtcttcagacactattttccttgccatcgtagagaaacggaaccgcttcaatggattgaaaggaaacgaggccaaagagtgatcatccacctcatccggagcgtgccctagagcgatccgatacctgagaataattagggaaaaaacgatgatagattgacaaatagtataaacactggtgttagttatgcaatttcccctacctgaaattatcaagaaagtagtagcctctgtacatcacatttctcatcgtctttagctgcagaagcatcgcttggtttgtgattctcctcccgttggcctcctcatcgacggtttggatccgcagcagcatgcgttgtaactgctgtagattctcctccacaccctgctgctgctggcagtatctgtcgatcacgaaggatatggatctgctgagaagatcagcgagaaccgcagaaaggaacgtctccatgctgagattttgtggattggaagtttggacaagggaaagcaatcggcaggcagcaacttaaacataagactggccacaggttgtcgtcatcaactcgtggtgttgctgacttgctgttcaattgctatgcatagccggcgtctaggtgcaatacacagcgggtcgccgacggcttgtgcttgtaagctttggtttctgttgtggactgatcatttagtcaagttaataggcgacaaaatgaaaggctggtgagaggcagcgattttgagagcacgtggcagccttagaattagccggcgtcagctcatttctaactctttctctagccataacttcttcaaatctgaccaaatttatagaaaaacataacaatattaataacacaaaacaaatatactattaaagtatattcgatatttgatttaatgaaactaatttagtgttgcactaattctttttataaattgggtaaacttcaagaaatttgactagattaaagttaaaatatcttataatatgaaaccggtcagagagtaattaattaaactaggtgacagattacggtccaaatcatgcaactgttcatgttttattcgttgagaaaatactcttttgttccatcttttgcttgactattgatgctcaacttgcccaagctgatggcctcatgcctatccatgtcggcgtaagcctttgttgcctcgctgagttgcagccgctcggcccgcgcccgtgtacggtgttcgcgggctcgaggcctatgttgggcacttgggccttagcccagtccctgtgaagcacgacagcacgatacactgatgcacctctcgctgtgttacttgtgtacgtacacaggaggcctcagctgcaatgtatatgtactagtaatcaaaacaacttcatcctagctaaaaggtgctaagctgtttttgatactattcttttttatacagtgcactgctttaagtgagctatgatatttcaatgcgccccttaacatctacagtccgaaaagaagaaacatatcttacacacgcaagtttcccgtgcacatcaactatcaaatatcacgaaaaattctagaaaaaatctaacatgtactcttaatagtattacacatatttacaaagtcttatattcaaattcattatattttaaatgtaacaaaaaagcgaaaaatatgacaattttaagagtaaaaatttgtcataattttatcttttttgttacgactagtttataatgaatttgaatatgagatttcatagataggtgcaacgttattgaaagtatgtgtccaatcttttctataatttcctatgacatttactaattggtgtgcacggaaagtttgtatacataggatatgttccctgtaaaagatgttagtggtgatggtgagtctatcactcccaccaaccaaccactatcatgtactctctccatgctaatgtaaatataacattgattcatagttctaagatatatcacatatgtaatatgttacacttatatttgatcaaaggaagtaggaccacaaatagtgagtaggcggacttttatccattccccaagccacccaaagtaaacaacatgaaaaatattgctatatttattagtctgctttatttctcatggtcactgacttgctatctatagaacaatgtgttttgtatttttacatcaatcttactaatatacatcagaaaatttactttcctagtgatctaaaaattattataatgtcattatttcagatgcagtttaaacattcttgttgtattgaactagtttttagaaaaaaaaaacaagatgacataaacgcaaaccatattgtctctaatgcaaggaattttctcttcatgacattgaggtgtactgtatccaacaaacattctttaaaaaaaaatcaaggctgcgtttgagacaaccagaggagaagaaaaatctcgcgttttctagacgctttcctaattactaaacagtgttcttttgtaaatttctatagaaaagttatttaaaaaaccatatcaattcattctacaagtttaaaataattaatacttaattaatcatgcactaatagttcatcttgttttacatatctttttaatcttcttctttccattcctcccaaactaacacaccctaagcctacaaaaggagaaaagaatccagtggagtatttcaattaggtcgtggcagcgataattgttccaaggaaatgcttcaaatcagtgaccatatacaacagacgcaagcagtgggcaagtataaaaagctttgggaaatggaaacggaagcgtgtccacagaacaccactggctaatagcttgggtaggtacagggggaggaacaccactggctgccccctggggacacggggagaatgatgagcacggagcatgccttgtctcatgagcaccggagactggagcaaaagttgaccgggacatgcaatgtcttctgcccttacggcaggacgaccatcgtgtgtaggggcgcaggtttattataactactatgccatcccagtatgcactactatggcacacctctgttttctaaaagaacatctatgaacaatcattgtgcatttgtaccaaacatacgtctagtgactagtgagtagtgagtttacacgtagctctctattggaatgaaggaattctgaagtattctccgcagggttgaaatttgaaaggtcatttagcttttgtttttttctaaaaaaaaacaagaaataccattagcatatatttcattaagtattaactattacaacttaaaaaattagtttattttattttaaaggaactttatataaaaagatttttttcacaaaatgtatcgtttagcaatttgaaaattatattcacgataaatgagagagttacaaatgcgaaacgaggaaaataatgcaccctaagtcctgtgaaaatcctataaaatccctgcatttggtggatttgatttctcttgtaaaaacgttttagtagagtaaataacaaaaattccatgctttcaaatagagcatcaatatgcttcaaagcacattggttggatacgggcagtttgttatcttgttatactttagtgaatgcatttttgagacacaataattcttatctagatcttggatggagcaaggctgaccgttcggttgaagtctcgcgaggatccaactattcataccttttgtgttactcaatcatttccagtcaatcaaaacgccttgtcacctttttcttctcgcatgaagggcatcatgaaaatatttttaattagtatttgaaggactagatggccaggcatcgtatgaaaaatgagagaaccgaaccttgtttgaaggtgatggccatatcatctcagtggcatagccacatgctagcttaattaatcaaaatcattaagaatagacttcatatgttctttcaatctatcgctagatatgacgggaataactgaatcttgaccaagaggtgtcctaaaacgttgtagtacttgaattagcagtggcatacttgatagatatgaacgttattgtgatgttaaaactctttttgatcaagatagagctcacactatagtttgacatgctagcaacgagaagctagtgccgacttaaaccgaattcaaaatgttgcacccaaataaacttcaataagcttcaaacaggaccactctcaaatgtcatgctggaatctcatctgtgtaaatgggcatgatctaggggactgatctgacttaatctgttcaaatttcaacgcatgacgggttctcttttaaaataatgtgctatacagggctagttaaatgggacaaaaattaaccaaacgaaatatgcgtagtacatgtacaacctcaacttcccaagtggtggtgtgcacttgagtgcaaccaactggggccaagtcttttgttgtagtggaatatatatatctctccattgtgtgtcaccactatacaacaagcagcaacacgctacaaccatccaagcagcaggagaaaagatacaaacatagatcagaacctgaagagaagacaccaagaagcaatggaaatcaaggacgaggagacaacggcagaggtggccatggtggtgcagtcgcggttcagaagggtatgcgtgttctgtgggagcagccatggcaagaagaagatctaccaggatgctgccattgaacttgggaaggagctggtaaattctttcatttgcttttttttcataaggatttgcattttttgttatgttattcatttaagtaattaaaatctgaagtgtttgatccttgagacaaccttttcttatatggattcatgggaaattatatttgtttggtcatctaactcaagagacttcacagtgtacaccttgttttatcttgcatggatgcatgcagattatgttattgtactcaaatgttcagccatttctcatcagtgcataatacacagaaaaacaaagtattagtgcaggaactgtattggttggaaagtttgtcatgtacaaaaaaggcaatgtccaatccttaaaagactttctagttttcttgtctttgaatagtctaatgttatcctttcaggtggcaagaaacattgacctagtatatggaggagggagtgtagggttgatgggtttggtttctcaagcagtacacaatggaggaaggcatgtcattgggtatgtaacacgataatcattccttagcacacttccattagcaagagttgaaaagtaatacatgaaactgaagaactatcttagaaactgatgaaatagcttcatgtcaaaagtgatgaatttgtgtcttcctcatcatgttctaaaacgtttgttttgtcatgtccctatgcagggtcattcccaagactctcatgcctagagaggtaccatgttctttctactctccaatagccctctctcagtgttcgccatgccatggttcccttgaatataccattactatttccatctaactagtcaaatgtaaagtgatatagttacaaaggaactaggaatgccactaggaggatatatcactagtcaaattttcacctatatatgaccagttttttttaactaaaattatatttgttcgaatatatcctaatgctaatctttaagtgcatggtcatctcatcatgtttatctccagatatagtatactattactgcacttaagcattgtaacgatagaaatatgataatgtttgtagatcttgttcctttgtcttttttgctagcgggaaagaagaaagagaacttatgatgaaggatcaggagaaatgctcactgaaatcttgttcccccatgatagatgatatctcactgatcttgactgcaatctctcaagcagggatgctggctagatttaacaaagaaaaagcccatcacattttctcttgtcccccatacctgcaccatgattgcctctcctgaacttgcgcctctgaataaaaaaatactgctgtgaaacagtcaagtcatcttacctttatttctccatctgaagaaagttggtcctcttttggttaagcaaaaagctggctcctctgctaatatataatgtgtgtttcttgcgcgtgtgatggtgtatgtacatgcagatatcaggtgagacagtgggggaggtgaaagcagtgtccgatatgcaccagaggaaggctgagatggccaggcagtctgatgcctttatagcattgcctggtgagtatatgtcacctgagtaagtaaagcaaccaatcagtgaagagtagtagttataatggtaaatttggtcatcactttctctaatctgttatgattcactggtagtgcattctgactggaaagtttaaagttcaggttgcatggtttgactctcactaggctatgtggccctgtgtcctgtgagacatttgctgtgcagtctgcactatgtctgcgagagaaaaattagacaatgatttttcttttttagcaaaacgaccgcatgcattatcttgtaataggaaattcagagcctgaaaaatcttaaaattatgggttcagttcaaaatttataagaaatcaggacttgagaaggccttatcctgctgggcttcaacttgcaggggggtatggaacacttgaagagctactagaagtaattgcatgggctcaacttggaattcatgacaaaccggtacccaactgtccaatatgataaaattcgtcctaaatttgaactataatgtgttaaaactgacatcagacttgtcgttgaaacgttgcaggttgggctgctcaatgtggatggctactacaatccgttgctgtctttcatcgacaaagctgtggaggaagggttcatcagacctagtgcccgccatatcatcgtcttggccccaacgcctaaagaactcattgaaaagctagaggtatcatgtgccatcctcaccatttgttcagttcacttgtgccaaaactggcaaataaatccacatgtagcaaaatttcatatatgactaaatctttctagagtaatggtccttaacatggtttattctgaactgtatataagctttgcttctaagcaaaggttactactcaccagagttggtctgcttaacttgttgatcaatcagcaccaattttgtcgttaaacacctggacactgcgaaaaaaatgtgagagttagctgcaaggccaaagttttaattaagtaaaactgtcaatgaggattatatcacaattatgcatatgctcttggtccagtgtcaaggtcctcattactgcaagagcaatcaaagtacaaattccgtttctagtgtagcactaaaacgttattgcactaataaatgcacattgtggacctgagacctatcaactgaaacaatggtagactaaaatgtcggcagaaaaggactaaaagtctaaaaccagtatctgtcttgcaggagtactctccccagcacgagaaagtcgtgtcaaagatgaaatgggagatggaacagatgagctaccctcagaactacgatatccccaggccaaaggagggaaagatgatcatagaagcacaacggggaagcaggctatggatgtaaatcgtagaacgacaagaaagcaggcaagtggtaatatatgacttgtccaaaaaaaaaaagttactaatatgagatcagtacttcagtagtgtagattgcttgttggtgtgatcagaattcctagaatgtgtatgtacgtgccaggagtatgtatgtctcatttatcttcttttcctctttcttttggtttctgtaacttggggagaaggtgcttactactgaaccttttgcttcatccttcacataatcacatagaactactatatgctatctgtatacttattctacagctaaactagtgataattagcaatctatgcacaagcataatcatctctgttgattctaatatagaagtgatccaaagagaatggaatctgaaccagttccagacttccagtctgaagaaacagtgaacagtgagatttcagcaagggagaatgccagtttgggcctccacaaccacaaggatcaagggacctcctcgctgtagaaccaccatgggctcccttcctcctttgcggagacaatctccgcctgcggccacccaaacattccgcctcaatccgccgccggcgagtagacgtcagtacggatcgaaggccccgccgccgcgggggcggaacaaccacggccaccggcgtattgagttgcctacctggatgcaggcgctgacggcgctgatcctcaagccaccagtcgccggagtccgccgccacccacgagccctccgagtccgcgtctccaaccccaattcccccatccgcatcgggaagccaatctaggccgttcaaacttgatctaaccatcgacgacgcttcatcgtcgatctggaccatggaaatctgatccgacggttcccgaaacctaggcggcggccgtgctcatcgacggtaggcaacacgtagcgccctagcgcgtagagccaagccgtcgatgttaggctaaacctactcctttcaacttctcgagtcgctgtcgggagagaggcctcggagactcgtcgtccgtcgagggagaaagtgcttcttcgtccacatctccacggtgtattcgtttctcgacgcctctcgcggtgatctcgacagtgtaggtgaaacgagctactcggtgatcagtagcaattaggagcactggtaaatttcttcggatttaggaatactagttagccacgtatcacaggccgctgcagtgcctgactgcctgaacatgttgaacgacaggtcgacaacacggatcaggcccggcttgagggggtcgagctgtgccaccgtactaagccctcgaagtcaagggatccaacctcatatatctatgctatggatatagaagcctataggctgatttaggaagcctagaaaaagaaagatatacaacttatttgataaaaatatttttttatgtattatacatttgttagaaacattattatattatcagagttgtattaaagagtccatctttctagcttcgctccggaccattaaattggttggaccggaccacggtgcccggctggacctaatttgttgagaagggacatctctgcatctgcgtctgcatcaactggtgatcaacatcgggtaagttgagcatgcatcagttttattaattcatatgcattggttaaacacgttgtgcatagtacacagggaaaaaatagtgcccctaattattttgattaatgaactggtattttaaatgtgccaatttcattgaataaaataggagaatatttactagtcctatatagaaaaacaagaagtctatgctagatataaagcatttttgctcctgactagggtttgcaatttcgtttcgaaatttctaaaattttggtaatttcgtcccccaccagcaagctcacatctcacccaaaatttttggttttttgcaaatttttgtgaatttgatcaaattttattcaaattcattcaaaatcaatcaaaatttcaaataattttggacaaaaaatccgaaatttcagtaatttcgctcctcccggaaaaaaacaatttcaaaattgaaaatcctgctcctgataggacccatatcttatcctcctcactgatagttctttgtgccttaaaactctctaactctctggatccgtttcttctaagtttcctatgaaattagtaatgtaaggtgcgcaatcccttttttatatactcaggcttacagctagtcctatccatcattcgtggaccgttgtggccgagctacaacttatcggttatatttgctccttggagattcatgttgacagcattccctaaactctcttcatgtgtactacattccgccaagaggtgtagggtcatctccaaggtatgtcagtttagcgggtagtaggcgttgttcggccatccgtgcagtcaaacgtctgtgctatctgttttggatcactagccctaaaaaacttgcactttcttgaggcccaaaaatttatgtttaatacaagccgtattatgtttgagaaaattcccatcttcatatttttgttggtaatagcagccaccacaaatatccttagctcataacaacaatgtgagaatgtgcattccaggcactgaacatttcatttttctacttgaattcctaaagaaaaccaaatcactacatcaggttgcaatgctttccctagatttaaattaaacaaagcgtcgccaccgttggcagctggtaaggttcgtcagtcatatggaacatagttagagagtccgttggattgatcaataattttcttaatgcagatagaggatcatcggtcgtacgtggtgtggatcgagcaaagtataatggcaatggagaccccttgcggcaaattgtaaaatatgcatgctaaaaggtgggtctattattggtatactgtgtaattttggttaatatactatcacaaagtgaaatttacttgtcatttaatggtattttgtaaacagaagatcttactacaatagtagcaccagggcctcaaattcttagacatggttttccaggctgcagctaaacttgtgtcggtgtgtgagcaccaatgtagtactacatatcctattacggcctgacctaatgcagcattaacatgcaatcatcttaagcttaaagtatccaccattgtttctagcccttctagtcatactatttttgagactttctccacaggcactgcaacagaatggtgcctcatgttagtcaagtggacgggatcaccctgcaggtgctctaatattaattcgttaggctcaactcgtgattttgaagcttgatttgattcacatttgactacctaggccttcatgtggggtcaaaattcagaggtacaaaacagatgagtgtgaagtctcacccaacggctaaaataatagagctggttgctctaaggctagatgtgctgttgggccataacctttgcttgcattgacaggaagcagatgctttactactacaaccacctgcctccttccaaccttgtgttccaagtgacaaaagaaaattttgcccatgacaattattggattaatgaaagtttggcggttccttgcttttattaatttaatctaattagtggatgcaccttcgtcagattgaggcgtcaactttagagatgccacattgatctactgctgtagtttaagtgatgcatttgttgtatgcatgctttgagtagcgcctgtgtcttgatgctacttctgctaaaatttgcacttgtccttttttttttcccaaaagaccaaaatttgcacttgtcacccagtcaaaagaataacagatctcagcaaatgacataaatgtgtagatatgccactgtgtgtatgtcttcttctgatttcttcgttgcaacaactttagactttcgagtattggataactgtaaagcatgcccactgatttctgctgttgtagcaataatgatagaaataacatgacacctcagctgcgatgatttccatcctacctactagcaaaagggagtacaaaagaacattcatattcagagagaatatgaactttctcagcgtatgatgctatccctagtatgtcaactaacgaaagcattaactatctattgttcttgccaccacatgattaaacatatgcaacccctaattagtgtaacagaagttcttgtcctgtcaatgaagatcatgggtcctctttacacatattatttacaaaattactaaaaacagtactgtggtctcgatgctttatgaaagtaagaaattcagatgtgactggtgaaggtcaaatgtgactgctttacgaaaaacaactaattgttgcaatgctaaaatagcttcacagccacgaattgagcgtagtggttaggttttttatggtataacctgtacacacccgatttaaagttctagacttaatataggtgtttgcatttacgactaattattcttttaatggtaaacgacgtacttgtcaacagtgagatgctaacccaatcttgaaggtactcataaggatagagtgtacatgtgtgtattcgtatgggtgaatacaccatgtatataaatgagcgcgtgcatatggggaacatatcctatgcacacagccttcccgtgcacactctgtgcacaccaactagcaaatatcagagaaaattctgcaaaaaaatagatacataattccaatagtattacacctatgtgtgaaattttatcttcaaatttattatattttagccgtaacaaaaagataaaattctgactgatttttagccttaaaactatcagatttttcaccttttttttacggctaaaatataatgaatttgaatatgagactttgtagatatgtgtaatactattagaagtaaatgtctaattttttatagaattttttgtgatattttctagttggtgtttatatagtgtgcacaggaaacttgtgtgcataggatatatccccgtgcatctgtgccgtatttagccaatgatccaaaggttctaaagcaaagggcgcttcacagacttccaacccttattcccttgagcttttcctagtgaaatgcatgtgaattacgaaaacaatgtacgtactctttcaataagagtaggaataagtatattttaccctcttgagctttacaaaagttgggctttaacccacaaacttataaaatcaaattgttttacacttaggtgattcttaatgatatgaatccacatcagagcttttgccttattgacagtcatatcattgaacttctgtgaaggagattcagcatcaagggtcatcacttgacatcaacaatgtcggtctttttcttatgacgtattaccagttcaccagtacctctagtttttttttctctcactacctcttgtcgttgtgtaatgaggtatatatttttttttcgaaatgactattgaggtataaaatgtttcagattcaggtgtacaacaagtatatcctacatgcatatgccacgaatgaccctaaccttagacaaattttcatttatttaaatcaacaaccacactctctctctctctctctctctctctctctctctctctctctctttctctctctctctctgtgtgcaaggaataaccaattcctttttttgatctatccctcccctaaaaaaaaaactttgacctacactatccaattacaatgcatacagtacagtttgttgtatatatgtatgagtatgacccactcttggtcaccttggacgattgtcgctgcatatggagcgaaataccacgtccttttggacggtggcaaaatggtccagccgagctttgagccggcatccacattttggcactattggcctacaagtaaccagaaactaggatctccaaactaggccacaacccacaacttgaccttgacgccttgttatgtgtagtcttattaatatactagcagtactatgtacatgatacaatactttgaaaacaaataattgctgtatgcgtccatctgcaagcaattcaaaaccagccgaaatcaacatcccccagctacagaaaaacaaaacaaccggcaacagtacaaccgatcacgattggagaggagtgtttcagccttggaagacccaccaacggagcatatcgtccttttcgttgtcggcggcggcgtaggctcggtacagcagttggtggcttggctagtcatggaggaagttgttgtgcgcacagggttgtttttttttttttttttgggttgcgtttgttgtggcagcggcagccagcatgaaggcgaacatggaaactccggcgtcgtcagagcaaggaccaaactgactgacccacaccaaatgcatacgcacacacgccaccaacaccttccctctccccctctcggccggcccactggtgtggtacctcgacataaaaatgcctctccctctccctcccttcttcatcttcctccgtccactccggggcgccattgcctagaattgatcaattgatactgcaatcaaggaagaacaccatagctgcagaggtacttatgtaggttgctgttcaggaggaggaggaggaggaggcgatctctgtacattttgaaggatttttgaagtgagtatcactcaattatgtggtttgggagttacattctgtcttgggtgtccctagctctgttcttgaatttcaagcgtgtttcttatggtttggtacataattttatttcaagaaaggtggatcaagtctgagcatgctgaattccaacttacagagcaaatagcgagtgatgttgaattgtttcttgcctgtgttgcatggttggattgaaattgaattgcggcgttaggttaggcatctgtaatagaattgcagccatgttagacaaactgagaactgcttctcgtttcaggaattttactgttgatgctctccatttcttttcttttcttatttttcctgttgaaagatcatcctctgaattttctgcatctctgaatccaacaggtagagccatgtggtatgtaccgactagtacacacgtcttgataactatgcttaatttcttacccaccagatttttctcaactcatatacagaccagtacagactcgctggacctaatctggccaagtctgactctgacctggatggcactactgcattctcggctgcatgcattgcccatgtttttcagttttgctacatgcactttctgccggctaaacaagcaaaaccagcagttgtccatttggactcaccttacagccaatgtttttgaactagttccacatgcagctgtaagccagcagctgcaagaattgaagaatatatgagcttggtcagctctccaggcataagaaaagaattttgcactgttcgaacagaatcttttagactggccaggattgtctttttatttcagacacttggtaggagctaacgtcatcccgttttaggagttaggccgatcatctagtcatcctctgtaaacaaagaagagactctttacggcaacatagaatttaaactcctgagtttctcgatgagaatgcaggttcagtcttcagactaaaagagacacaggtggccaagatgactgctggtttccagcttggtgtgatcggatcactgacgctctcagtggcatcatcggtttccattgtcatctgcaacaaagctctcatcagcactctcggatttccatttggttcgtgcctcatctctgttgtttgtaatcatgggcaaaacctgaatggcatcattacataaatcatgagcattcagcttactcgccaagtatggtttatggacactgcaccatactgataccagttcaataaaaaaaattagacattattatcacttatgacttatgatgtgtcgattgttattgcagctactacattaacaagctggcatctcatggtgaccttctgcacccttcatgtcgcacaacgtatgcgcttttttgaaccgaaagcgatcgatgggcaaactgtaatcctatttgggttgctgaatgggacatcaataggccttctcaacctcagtttaggattcaattccattggattctaccaggtcagtgcttttcttactgtcttttttaagaaatcattagtcagatactaaaatttggtatgctctgcagatgacaaagttggccatcatacccttcacagtaatgttggagaccatcttcttaaagaaaagattcaggttacaaagcatactattaagtattatcatgtagcctaaaatacatgtgcattcagatcatgttaatttaaccaaaattattgtttttagaatgtacggttgactagaatcacctactaaatatcctgaaagtgcaaccttgatggatttaactcccaactgaaatttgtaccaaatgctatttttgttttgacaaaatcgtttggtaattgtgccaaaaaaaaaagcagtcaaatataataaagcgaaaaatatgattagtttcatttacttttctggagctcaatactcaatagtccatgcagacttgcggtatctttttcttttcagggaactcaaccattcccttttgtctagaattatgctgacacgaatctaacacacaatgtgcagtgagagtatcaagttttctctgctgatcctgctacttggagttggcattgcttctgtcactgacctcaagttaaatcttcttgggtctgtcctttctggcctcgccatcgccacaacttgtgttggccaaattgtatcctacagtttaaatacaactgttaatcattcagattccataagttgcatcttttctgctttacccattcatgctccataccgtgctattttagctgccaaacgaattctattgttgccagcgtttatccttaacccgttaaacttgaacgaagctcaccaacacaatacagaagaggttaaaggtctcttcgacgcagcttctgtatcaatccgcgccttaccaagcggcgatcctgttcgcaaccggccccttcgtggatcagctcctcaccagccgcagtgtcttcgcccacaaatacacggctccagtcgtggtacgctctctctcaaagccaatttggccaaatttttttaagcagatacaatgtattaaacatatactaataataaaataaattacagattccgtctgtaaactgcgaaacgaatttattaagcctaattaatccgttattagtaaatgttaattgtagcatcacattgtcaaattatggcgcaattagactcaaaagatttatctcgcaatttacatgcaaactgtgtaattatttttttttcgtccacatttaatgctccatacatgagttcaaatatttgatgtgatatttttgttcgaaaattttgagattaaacgcaccctaccaacatttaatcctgcatcctgtcgtttcctgcgaagtactgctagtagtactgtagtactgcttccaaaagtgcagtcccgatcacggacgttttttgttcatatttgcagggtttcatcgttctgtcctgcctgatcgcggtgtccgtgaacttcagcacgttccttgtgatcgggacgacgtcgccggtgacgtaccaggtgctgggccacctcaagacgtgcctggtcctgtcgttcgggtacacgctgctgcatgaccccttcaccatgaggaacattctgggcatcctcgtcgccatattcgggatggcgctctactcctacttctcggtccgggagagcaagaagaagtcggcaggcgacccacttcccgtgtcgcaggttttcattcacatcagaattagctttctgaagaattgttactactgccagtttgattggggtaatcaggttggtgtgattgatgcttctttgtagatgccggagaaggaggtggagccgctcctggcgaccaaagacgtcaacggtgacaccaagaaggcgaacggcgtgacccacgactgttgaatatatgtgtctcatttgttttagcatttagcccagcatttagctgtgtagcaccggcacacgtaagcctacccgttgtatctgaaattctgaatggccggggaacccgttcctttccatttgtcgatttcttgcgctttgtaagaagcggagtacctgtcgtcggagccggtacaggcagcagcccaaaaaactcgaggcccccggcaccacgagacgtacgagactgctccggcccctgcttctggatggatgatacgcaaagccccgtgtaagaaaaagtccatttggagtccctcatattggccgaatttctattaaaaaattcattggccgaacttaatttgaatctctcatcgcaaaacaggctatgtcgccaatagcttattatttttgttttggaaataaaaataaatcccacaggtaggtgaaaacagtacggaaacggatggaaaccacctttatcgtttccgttttcattttttttcggaatcggaaaccccagatacgaaaacggaattgaatattatcgaaaccgaaaacgaactagcgcgaatacggtaacgaaaatttatcggaataaaaaaccccctcaaactgacaaatcctattctcaagtctcaatggttaacaatttatcataaaacacaatcatataagtccaattattaagtcttaacagtacatcacaaaacacagtctatagaataaattatctatatttaagagagtaatgcttttgataaattccaatgcatgaaaaaaaatattcttatgtaacttcatatttgcataacaaatattttttttacaaaaaataacagccaaacattatggtattcactacttagtgcttaaaaaaagaatccagggtatttcagtcacaaaatttccggaaattccaagaaaatttccggaaagtttttgaccgattccgagttccgacggaaactgcccttatcatattcgattctgttttcgagaaaatatttccaaattcgtttctgttttcgaacaattccaaccaatagattccgttttcgaaaatatgcccggaattcggaaagtttccgtaccgttttcacccctacccacaggtttactgaaaacctataaaagccaaaaaaaaaccaattagttttaatcaatgccacgaaaaaccagctaaaaccaattagtttccacaaaccaatcattagggatttaacaaaaattgagcttttttattaaaaaaaattggtcggttttgtgagccctgatattgcctccctaagtattgaagccagtgaaaaacaactcccttagttgtttcaagtgtttttggttgacgtggtaccgacgtggcatgttgacccagtattcatcctacatggcgcttacgtggtattagaattgacaaataaaaattatagtaggacccacgtgactatttcttccttccccctctctctttctctcggtttctttccgcatcttctctcattgtaggcagaatatacgtggaggtgaagctcgccgacaccatgtgtgaagatggcaatggaactcaataaaggaagagatgaaactcgaggcaacaacactaggcacctcacaccgtcgctaccatcggactcagatgtaagatggtgtcgtggagtaggaggcctcttcaagacactaagtagatgcgggcgtatgggacttggggacgcccaacgaggagataagggaaatcgtgctcttgccatgccacacgagaggcacgaccgatagcaggaaggatggagccaggggggagggggggctctcgtcgagcttaaggtcatagttgaggtggcggtaggcgagactcattgaacccgtcaaatcgaggaccatactgttgcaaggtgacgaagtagatgacatggagaaattacatgtgggccccactttattgttattaattttctaactatagtgtcacatagacaccaccttagaaaagactaggcatacgtgcaataaagacagttaggcaccatgttaaccaaaaccatttttaaaacagctgaaggaatcatttgcattgattttaatagcttggggagacgatatacctggttttcggttgagctaaatgattcagattcagccaatagttgagtagtgaagatggactttttccgtgccatgtttgccgtgcctagcgggcctatggcctagacgctggtccagactgaagggtgcgaagtgaacttgccagtcgttgccgccacggaagcacaggccctgttataagacttctttttcgtagcgggcagcctcggcccacgtagcttgggtggggtgttagacgaaccagacgaaaaacaccgagtgcggtcccagatctccgagaatatataatagcagtagactgttgctaagctgggacaccagtttttttaagaaccgacacgggaagttgaagacatacatacaagtagcactacttcactgtgcacacgtacatggacagacagctagcgtaagtaggatgcatgtggatgtagctgcacacaacatcccaataaaaaagcacatggcgttttcattccactctacacaaactcatcatgccgctgatctcttacctgttacggagtactactacactactacaactctctctctctctctctctctcttgcagcattgacctgtgccgaagcacacgccaacatcaccatgtgcatcaatccccgaagaactcctgctccatcgcataacgccctcctccttaacggcctcgatcccgcgcaaatatagtattcgcacacacagctagcaacgagctagtccgcggcagcagcgagcgccaatcgatcgaacgaacgggtggcgcgcctcgcatggatcgcatgctgctcggatctcccgcagctggcgatcgagcgagagcgagagcgcgcgcgcgggggaggcggcaggcggcacggcatgcacgggcgggcatgtgggcgcaaccggcgagccggcgacggggcgggcgggcggcctcgtgccgcgggaggcgctcacgtgggacaggcggcatacacgtttccatgctctgcaaaaccccgggaatctttgtttccgaggccgacatgatcgatccaccgcaattaacccgccccctcttgcggttctcgtactcccatatcatattgtccacctccaacgatcccaatatcaaaatcgatcgggtcgtcggcttcgctcgatcgtcatgacgcatgagtctctcgttggatcactctgctggtggggcatttcttttttcctctctctctctctgtttcttgccaacatctgttgcatgctgtggctagctaagctactactactagtattagctcgcctgggtatctgcaagtcaaactttttggtgctcgatcgaattgatcggggacgatggacgaggcgactccgcacgttaactacattatttctggggcgtgggtgatcccgatgcggcggtctttgctccgtggttcatggcgggtagaggaagacggacttatgtccatgttcgcgtgttccttctacacttccgtcgcccgctacccctgtctcatcttccttgaagtttcatcgatcaacaccgtcctcggtcacacacacacgttcgcgcgctcaagtcaagattagttacaaaatgctactcttaacctcttacttactcttcacgtgaaaaatgttaatcgttggcaacaaatgcggttccacagatctgtcggggataattgaattgagaatttgagatcgccattaagatcaaaccgtcaccatggacggcagctgtgctgcttgtgcagcatacagtatactgtgccatgcgcgaccatttggcacgaactgttgtggtggtgacgcaccgggcactgtatgtaggcgcaagattacaaagtgggagggggtgcagtgcaggcttaaggccaagcaagggggcaggaaaatgtagcgaggcattggaaacagaattgaactgtatactgaggcggatgtgcccccttgcactggctggaaaacaaaggccctgcaaactcgcctgtccgaatccacagcgttgccaaagcgccaatctgacagatgccctgtgccttttaatctagcctcagctgaaagctgatccgccccatgtcttgagaaatattgttacatgcacaacgtgtgtgaatggttccagagaaagaaaaaaggagaggcagaggaaagcgacgtgccaactaacaaacatcaggggcgagatcgagccaatgatcattaaacaaagtggagaaccaatggtttttgtttatccacttctttttctttttttcccccacatgaagcagttggagacttggagctagtattttccaaagccgcacgaattaatcaaggcagtgatcttgttggcgtcttgcgctaaatcaggctatgtccctttcacatgaacaagtgctgaatactctacccagagagatatgccgacgttacaatatcctgtattccgagcgtatgacgattgtctcgacccttgacacgggtttttggcagctttgcttactcgcttaacagtgtgtacgtactccagtagatgacccggctccaaaagcattcgatttacttaaaaagaaaaaaaaaaggcatgtgtcgtgaattttgtgatgtgctccacttgtctggaatttgtgaacagtgagcgccactactaccactccgctgttgttaggcgtgtatactacctgtaccccacaactgggtcgggcggggacgacggcgacgatggggcgggcccggcgacagcagaaggcgacgccgatggcacgggcacgcatcgcccgcgacaaaaatcccacctcgcgcgcgtgacgaggcacagagcgcgcgcgcgcgctagcccccctcgtcagcgacgtcgacgccccactactactctccaccgtgcaacctggcccggttgtccggttgctgtccacggggccccgccaccgcccgggccctcgcctcgcgactcgcgaccccgtgaggcgaggcgcgcgtacgtgagttgccaattgccatctccgttgccgacggcgccgttacgggggtcggggggcaaaggagagttgacctgccacccgcatgtgtttgtgggtgtgttgcttcggggagtgcttctcaccgtgtcgttgcttgttgtttcgctaggtcttgggcatgggagatgtgaggccaaatcaatacccgtctcggaacgaggagagtttgctacagacagagaagctcaattaacccaagatgttgtcaaagggaagcttcaagatagtaatttgacttgtctggattgtcaaagggatatagcaagatcaagtcaccaaacggtttccagtgcagaggtttctgataatcctgttctttcagtagcgggtatgctttaatcttcagaagatcagaacttcccttttaagaaaaaaaaaagaaaactgatgagagtttgttgtatatagcactatacagtctgcactacagactacggagtaaagacaatgcagcgtcatgaatgctaaactcgggtggtggtacatcgtcttgtcgtcattaactaaccaatgtaactgtgtcaacggagtgatgcaacgtcttaactaaactactgtactgtcgcttaaacaactgcaccattcgtgtagcccgaaatggagtgcgtcttcaacagttttcagcggcaaagcaaagtaaacgtccccgagcacgtaaaagcaacagctctgtttctctctttactctaactggagaacaaagttctaacatgaatctcaagtacttttgccggtcaaccaccacgcgaccgacgaagcagctaacatgttgggcgcaaacttatactatcatatgctgattgcttcaattattccttcgaaattccatgatgcaactatacgatagcttgtggactaaacctagctggtcattccttaatggccaatcaagcacataaaagtacagaggctgagaaatactagttcagaaggttatgggaacacaagatatgttaaatcgaagagtttcgcgtgctgacataaatatgtactctaccacacgtctctccgttaagtaattagctgactcatcctaacctcaccatcgacgtatgaactgattagagtattgatcaatcgaaacctcaaaatggtcactctccatgcgtgcgtgcaaacgcccggccggagactatatgaaatgaagttccaaaattaaacgttatcgtatacacatagtccatttcttctggatttctaaaagatcatttggactactgtgtttggctgtgttggatttattattgtcaaactgaaccaagactgcatcaacccgtcatacttatcaattttttaggccccttcaatcaagctcatgatcgtgaaatcagagcaatgaaaatgccttgagtaaaaagactgtcctcttctccaaggaaatctatatacacacactaatccacacttaaaaagcatttacgttcattgaaaagatcggttcattggttagatggatcatattattacaaccataaattgtgttaaaatgtgttcgtgcagttgtgtaggcagatagaaattttatacccatactaggtgaaacccttcacgttgttgtgggaatttactatgataataataagtataaaatattgtgtaagatagctaaatgacataagcttatataagttgatgcggtttatgataatttaaaatagtatataaaataatgatacaaatgtaaaagtaagatgacgtggctttatgagaaaaagaaatggagggatatatttggaccatagattaatcatctaagggttagaaacaattgaagtaatatagctcaataagagaagaaaaagagggagataatttggactatagattcgtcatctgagggctaaaaacaattgagaagatatgacttaattataaaagtgaaaataatattaactaagtgaggataaactatataggtatatatgatactataaaaatgatgaaaatatataatgaaatattatgtgaattatatggggtgatgatttaacatgcttgcaatttaaagctctaaaatttaataaattatagataataaagcatgattgcatgaggtttaatatataataattgttagtagataataatgtgacatctttgcatgtggagctttagaatgtaatgggttgtaactttatcgaagagatgagtatgagtcaattattactagtttgtgttcaagtgaggttttattaataaaaaaaattagatatgtacatgaaaatcaagatttgtatgagtgtttaaaatggctaatccaatggtttggacatggaacgaccaccattgttttttgttagctagaaagatatcctatccatcctaaaatataatgcacaacaaccactaacgcaaaaataaaaaaaaataattattattatcaccttattgtttggatcaatccaataaatataatccgtatatcgatctaatgggaatagagatcttaagaatgaatgatttaataaaactgattaagaggagagaggtgctaattatatgcatgcatgcatgcatccctttactacgagatatggtaaaaaaaaggtgtcttatatgttgatagaaggagtagtatgtatgttggctaggcatatctcacgatcgtaaattgtactaagaatttgtgttaaataaaatgtagtgctggaaatataatggtctctttagtttccactaccacgaacaattttgtttccactaccgtgaacaattttatctttaattttctcctataatttaataattattaatttaataaatataaactgtaccagtctcatactctaatttatttaatttcaaaactaaaaattaacgtatttttttcaatttaagccactataatttggaaaatagccaacatattttataatttaatatttataatattgataacaatcgcccatgcattgtacatgttgacgattagtaataataagaaaaatgggcaaacatctactagtaaataaggaattgctacatgataatatgaaagtatatgggccttaccgtttaccctatgatttataagctgttgtcataatttggatttaaaacttgattttgaagttgagtaatgtaattttgttttgacattaacttttaagtcggtaataacatatatataagctattggcctagactcaccttgttagtaagaaaacatgttctttttattgttagcaatatagtaacaatagatgcatcccatacctaaaatgctacttgttctttagaatcagctccttatataaaagtaaaagtttgcaagagttacatatatagttttcttactaacaaggtgagtctaggccaatatggcagtgaaaattccagtcaaaaaaaatatggcagcgaaacaacaagtacaaaaataaaccttcaatggtttacaaagaagtcgcatttttgcagtgcgagagattaacatcatattgtgtaaatatatgcaaatgtacaaactacgtacacacgtatgcaagaattttaaccgtcttgattttagatagaagcaggaaaaccaaaccacacacatgcataagtacgttcacgttgcatgtcaattcaatgatcaagccaacatgcatgagcagtaacaacatgaaaaacctgcctcctaacgacatcccttctatttggtggcctctctctctctccactagagacgcccaggcctaattaaattgccggcctcagtaactaaccatgtgtcatgctctcttcctttggcaccgcggaggtcagcggtgtaaatactgatcagtttttatatattatagctataacgcactaacaataataactcctacaaaggagtacatgtagtgcgagctgcttcataaatttttttgatccgatagatttaatgtttatacttcctgttcattttcacatgttatattgtgggcatttgctcaaattattaatttgcatcatacaattttctatggaaccgtaggttatcatctactcctcgtcacctcagcgcaagtctgtcgagtccatgtacaatcggtcaaaatcataggttcaatgttttataacaactcaggatgaagacaagagttttgatttgaaatataaatgttcatctaaaatgatgtttctatttcaagtctaaagcatatattgaaagtttgtgttctttgaaaattaaatctctagtcatatttataaatggtgaagtagggatttatttttttccctacatgttcaacctctaatccaccctaacactagtgacggacctacgtatccattggacgggtaggtcagctgacctaactacgccctgcgacaccgcacaaccctagaaccccctcctagtgtattggaccgttcaaattagccatcacccactagctcataagcaacccatcaaattaataaggtactttaggctaggcatgagactatctatcgttgattcaccttataattcggtgactacgcatcccttggtcatgagctcatgactattcatcttcatactcgtcaatgactatgctaaccactagcgtcagtctgcgtgcccaaacaccgtgccgtgcacagacctgtgggtgtacaattgtgcctctattggtttgcctttgtatcctttgatgtgatgtcttctttcaagacagtcttaataatatagatatgttgtgcattatgtttggttatctttatcaagcatcaaggccgttgataagcatgagcaagctgatcgattgtgcagggccccaaaaatattggggccccaaatcttaattattttcttgagtattatatgcttaatcaggaaataaagaaaggccctcaaggccaaataccctatactaagttagtggcgatcacagcttggatagatcagcgagaataaacaaattaacaatggcataatttttaaggcctcaaaatgcatttcacaccggggccttaaatttctggagacggccctgttgagcatctcgcctatcattactttagagttgtgtccgccaatactgtcaatacccaaaacagtgtcattcttgctacgtataaattcgacctccatatgttagtatcatttacttaaacggacaactctatgacatatggtaattccactttagtatatcacattaacaacaccatcttataacaatgcacagaagaatccttggcacgatcaccaccacgaactgtaatcgttagctgttcatcgcagccagcagtggatgaaagagctttttagagccggaaaagaacatatatgaacaatcaaggatatcatctcacgcttattagggatttaatctcttgaacctacatacatgaatgatgcaaaccgtattgtggtgtgccggccagccagccaaaggtccgcccatgatcagaggacagacaccgtttccatatctccatggtgaagttaagtcgcaacaagacctgaattagaattaccctccccaaatcagtgaaaatcaatgctgggagaggagccggacaattcgcaggctgttgcccggaccaagccggcaacagtgtccggctcgtcacagtcacatgatttactgcgtcgaccgaaccccatggcatcgggcaagtagcacagtaccactagtagtaacgcacactggaagtcacacaggcttggcagttcacggtcctccacgcgcggttctccaacctcgctctggtcctcgccctccactacccctccccccctctactacgcgaatcgccacgcaccatccgtgtcatcccgcggttttgcgcctctcgccgaacggcccgcttataagtcgcccaaccggcggggttaccacgcgtgttaccgtgggaacggcagccaaaagccaccaccaccaacctctcgtcttcgcctcctctcccaccccctcacgacgaacactcacacggtcacaccactacccctgcgagatcggttgctggcgctgctgctggtggtgggtgcgtggcgatgatcacgttcgcggacctggcggagccggcgcccggcgccgagcggtgcgtcgaccggcagctgtggctggcgtgcgcggggggcatgtgcaccgtgccgccggtgggcgccgccgtgtactacttcccgcaggggcacgccgagcacgcgctcggcctcgccgcgccggagctctccgcggcgcgcgtcccggcgctcgtgccctgccgcgtcgcgtccgtgcggtacatggccgacccggacaccgacgaggtgttcgccaggatccgcctcgtgccgctccgcgccgcggaggatggggacgtcgaggaggatggcgccgcggcaggcgaggagcacgagaagccggcgtcgttcgccaagacgctgacgcagtcggatgccaacaacggcggggggttctcggtgcccaggtactgcgccgagaccatcttcccgcgcctggactacgccgccgacccgcccgtgcagaccgtcgtcgccaaggacgtccatggagtcgcctggaacttccgccacatctacaggggcacgccgcgccggcacctgctcaccacggggtggagcacgttcgtgaaccagaagaagctcgtggccggcgactccatcgtgttcctccgcggcgacggaggggacctgcacgtcggcatccggcgcgccaagcgcgggttttgcggcggcggaggcggagccgaggaggcctccctgcccgggtgggaccagtacggcggcctgatgcgaggcaatgcgagcccgtgcgcggccgccaaggggcggggcaaggtgcgcgcggaggacctcgtcgaggcggcgaggctggcgaacggcgggcagccgttcgaggtcgtgtactacccgcgcgccagcacgccggagttctgcgtgcgcgcggcggcggtccgcgcggcgatgcgggtgcagtggtgccccgggatgcggttcaagatggcgttcgagaccgaggactcctcccggatcagctggttcatgggcaccgtcgccagcgtccaggtcgccgaccccatccgttggccgcagtcgccgtggcggcttctccaggtacggtacaacatctacaccaccgcaaaccaatcaaaattttttgctcctttctcacttcctgaatcaatgaactccaggtgacctgggacgaaccggacctcctccagaacgtgaagcgggtgagcccatggttggtcgagctggtgtcgagcatgccggccatcaacctctcgtctttctcgccgccgcgcaagaagccccggattctggcgtacccggagttccccttcgaggggcagctcctcaacccggcgttcccgccaaacccgctggcacacggccaccaccattaccatcacaaccacccgtccttcttcccgttccccgacgttagtgctcctgcaggcatacagggagccaggcatgcgcaatttggtccatctttatcagatctccaccttacccacctgcagtcgagcctcatgtacccggggctccgccgccccgatcatgtcggtccaacatccatcccgccaccaagaatcagcactgacctgacaatgggcagctcgccgccggcgcgcgctctgtccatgggcgccaagaagcccgacgacgccaagccgccggggctaatgctgttcgggcagaggatactgaccgagcgccagatgagccttagcggcaccacctcgccggcggccaccgggaacagctctctcaactggaacaccgagaaaggtgcctcggagggctcgggctccggcgtcatccagaacagccccaccgacaacacgtcgtcggagaggctccagtggttcagggagaacagcaccgtctccgagctcgggctggagcccgggcagtgcaaggtgttcatcgagtccgacacggtcggccgcaacctcgacctctcgtcgctggcctcgttcgagcagctctacggccggctgtccgagatgttctgcatcgacagcgcggagctgaggagccgtgtgctctaccgtggcgccaccggcgaagtgaggcacgccggcgacgagccattcaggtgagaaacacatcaaacagcaacataataatgacaacatcccatgcatcatgcatgtcatgtgcccgctgttcgtgttacagttgcaacgaatcatgtagcgggcaacctttgaactgatgaaacagtctttttccctgacatttcagcgagttcattaagttggcgaggaggcttaccatactaaccgacgccgggagcgacaacttagggagctagagagcaaagaggacaaccgggagcatcgccgtagtatgtacagcttgaatgagcttatgattttgtatcaactagtagcagtagtagcagcactagtaatttccgttcaactagtaatgtccccaactctgcagtagagatttcaacaagaaagctcaatctgcacaggtatcctactgttctcctgtatccttcttcatcatcatcaacaacgatcagctgcgtgtacttgttgattcccgtgtactacgatgcaaaaatcctgtgaccactcatcagaggcttgaatgccgcggccccttggcccaagggacaagcgcatgcagcatgcagacgcagacgcaggtgcaggccacaatgtaatgtgtgctgctgggatatcattacgacagcgctgcgccatttctgacctctccggtggcctgacctccaggctccagcctccaggcgaggcaatccctcttggttctcttgccttggcagcaagctcgcttacccatgatgatgagatttgtgatctgcatcgtgctgcgtatccctggctagtagagagctagctgtagctgtatagccgctgcgtttcgggcataaatgcgtcagggtcacacacacacacacactcaacctgtccttgttgctcagggtgtgaaattaactgcgatttgttctgctcctgccattgctgaggaggtggagtagctttgcttgacctgaggccgacacctcatctactggagcgactgcccctttcacctgccggatctcgcaggcgcgtcgcgatttgcgtattggtccacggataatggccggtgcgtgtctcttacctgaagcctggccatttgtttgccttgcgctgatatttcgccaaccccttggacgcttgctccccgccatagctgttggccccgttgttactctgtggcaaaacaacaagattcaaagcaagcaacgcctagccaagaaggactcggctgtagatgcatggtcttattatccttattatcttgtcaagtactaccacccccctgctagtattaacaagaggccacgatgggagtatatcgcttgccgtcacggggcgttgtccggctcggcgctgccagccgctctgagagaatgtttacaccacggatgacaaggtatgcgatggcacacttttgccggacaagttgctgtctcttgcccaaaaaaaattcacccgcatacgacaccgttgggctacggcgactgtcagatagagccgtgtacggtgcacccaaacaaaaccacggatgtgtactactaccacaagcctacaactccataagggacacattgtttgatactccaagccctgctctaatttagattatctactcgattatagtttaattttttttacaaaactaaacttaacaaagcttaaaataaatggtcgaaatgcagcagaaaaaaactattttataaaatatattttttaaagcacagaagaaataatctgacaaatagctaaaaagaatcgaacataagagagcttttctcactttaagggtgtctggtggtagtagtttctataggtactatttaaaataggaatatttgtttgattctgataagggtaaattagatcgctcatcgatctattaggatatgttgtattccatgttacccatcatcgtatattttaattgtaactagccgggtggcctgcgcaattgcgcggctagcacccaaacaaaaccatatatttttcagcatgattttacttaagatttattaaatagcaatccttgtatttctaattatatagtttttaaaagtcacaccagctgctatcccttacttctgtcatatccttcttttgtttcctcggtctaccactatttctattcattctccttgaaacctctaaaaattggatcttatagttttttgagtttattatctcattgggtttcgtttttataatttttagaagtcccgtcaaacgctgccattatactcatctacggcccgtccattgtcttttctctttattatcattgggattttacaaatcgaacataataatcgttcgggttcatttttttactttctataagtcccgccaaaccgtcagcggttttgccattgtactcctttatggcttgcccgctgcctcccttctttattgtcattgaaatttaaaatgtatcatgattatcattgttttaattttactttttagaagttccgaacctttaaaaattggaccttatagtttttagagtttattttcttgttggatttcattttttataatttttagaagtcccgtcaaatgatgtcactatacacctctacggcccatccgccgcctattctttattttcattgggattctaaaatcgaacataactattgttgaaatttattttttattttctagaaatcccgccaaccgtcggcggtctgcaactatactcctatacaccccgcgcacgctgcttctcctttttattctcattgagattttaaaaatcgaatatgtttatcaatgggtttttttttttactttctagaagtcccggcaaccatcttacccgttcctccttttaatcatcattaggattctatttgatgttttactaacagttttatatatcgtatcaactgccaccactattcctaattaaaatctttttttctttttctaatttaatttttttaattaataccgtatagtgttttttttaatatttttatgttttttatcttttgaatttcagttgaactctcttttattttttattctgaatattaattaatctcatattggtttattatatggattattctttcactattgcttatttttaattccgaatttcagttgattttaaattgtattcctactttaaattttcttttctttttgctaatttcgaatttttttatttttattccgaatattaactaatctcgtattgggttcttatatggactcttctctcaatattctttatttttaattctgaatttcagctatttttaaattgtattcttacttgtactttccttttattttataatttcggattttattttatttttatttcgaatttgtattaatctcgtattgggttgttatatggaaacttctttcaatatagcttatttttaattccgaattccagctatttttagattgtatttctacttgaactctccttttctttttctctttttctccgattaatgtgggaatttctagcctcccacaacgaacgtggtgtctcctttcaaagctgttttaataatataatagattttgctcttgaaaaatcctaccataagacgtagtacgacagaatctggtctattcaatcaaagaatagctgcaattcatctgtgggtaccataagaaataatttcttttggaagggcggctaattagtgtaagtcacggttacatattagctacttgtagtggagtacgtactctctgtccaaagagaatttcacattttcatccgttcacgaatttaagggttttgagatcccggggagaataaaaagtatgacatgaacaaacatggagtatactacggacctgtttagatcaatttaatgtggtaattttttttgttaaagttttagtggcaaaagatttggcattgaagttttgctagttggtgtttagttacatggtaaagttttatcattttactaggaaagacagagaaatcacggctcccaatgtactttttggcaaaatttactactgtagactctcaaacaacaaataccaaattgccaacttttataaaaacttttgctattttaaaagaactaaacatggcctactttatcttttttttgttaaatgtgcaaaagtacaacagacatcaccttagctgtactttttattactacgttttcttttgttgaaagtgacttaatcttattttttatgggtgaatggagagtactccctctgtccttttaagtgtaaccatgagtttccgtatccaacttttgatcgtccgtcttatttaaaacttttttgtaattagtatttttgttgttattagatgataaaatatgaatagttatttatgcgtgacttatgttttaaattttttttaaaaaaacttttaaataagacgaacgatcaaaattagacacgaaaaattataactgcacttacaatgagacggatggagtatttgtaatcctttactttatgacctccattctgcactgcaagttgacatgcatgcttgtgtttttctaaatgccgtcataattgtatttgcatgtgttgggattggctaaaccttcctgctgaacttacatggtgatcagtttaactttcttttcagtggaggatgtggttttagggggcatgtataactttaattagagaagtatatactcgctcagtcctataatataagggcatcaacaggaaaagtggctattagagattaaaatatttttactactagataagatacatcgtggaagtagtaaatagctactatcaagccataagcttactaccaggttatagcactctgtggtgggtcctacctattttttaattgtggcatggcttatgtttggggtctttttttagatgggtcccaccttattatccagttacccaccctacacatatatacacattgtggtgcatcttcaatatactattgccatcttacatggacccaccttactacctacttttgaaacaaatattgaggatgccctaagggattttgggtagatgtgacacattttagtataatgaatccttatattatgggacggaggaagtattatgtttgagcactcattgtgcttacatggataaataataagagaaaaaagttgtctctttactcgatcgtaaatagattagttaaacataagatacgggccaaagagagtactataaatttttattggttcctagcttcccatgtttcttatatctatagatatatattaagttgtttctaactaacgaacatggaaattttatagccctatcaaccatatttactcgaccacttttttttttaacgaattggtaagctgccaatttcattgaatagagaatggagaaaactttactagtacgaaaggaaacacagctccggacctttggtccagatgagctaagaaattaaaaagctagccagctaccaagatgtctcgcactagccaatgaccacgttttggccttctctttgattttagccagcagactccccggtgatagctccttatgctggaagattctacggtttcttttattcgagcagactcgaccactttgattttaagttttgattttaagtgtaagtcgctttaggtttatgcaataaaaaaacaactcaaataactttgttgtccttacttacactactacagtgaaggcgataaatcattttttttgtgtgagtgatagcatttatttaacaaagacaaaatggaagaaaaagtggaaaggtaactcagaaatctaaaatgacctgtatttagagaagagttgaaaagatggtacatttggaaatagaggaaccaagtctggataatacacggctgcttaaactgtgccacatctgggattgtttcgacctcagaaattgccgatggcttcatgattccactgctacagggcgaaatatttgtccatctgcaggcttgtttgggatcagggcctttacaagctgtgagcaaatttatgtggcaatcagagcgagggcatgaactgaccggtatcacttttcctagctttttccaattagtttcaaatgattatgattgtgcttgcttgtcggcgctgatatgccatggccatcaactttcgcgtcatctttttagctttttcttccggcaaaggaatgagagtgagcatccgatgaatcccatcgtaaatttaatcgtcttgcttcgaaaagataatcgtaccgacaggcctttattttgcacttgactccactatcgtgttaaggttcaatcatgactttacattctggaattaaaagaaaaggaggaggaacggaattccaagtatttgattcccaaacaaaatttaaaatttaaaattttgaacagaactttactgaatgttgaacttggacaacttttcgagaaattcaagcagacaaattgagctttaatttctggccgaaggccgttgatctacaagtacttgtcggttaaaccagaaacctcaataccggtggtcaattcgatcgttagttggactcgcaatccgcagggaggcctgcagtatcgtgagtactacttttaacaggtactatacagcagccaatgcatgaacagttacacgaacactttttaacatgcatggcgttgctatatgctggccactgcaacaaagcgctgcacgattaaaccccaccaggccacaccacacagcgttttgctgcctttcttcgacggatcgtcccctcaaagtggcatccgccttttcccgatcgcaccgtgcatgcatggggcgcatggcgcccttcaccggcggttgggaaagtggcctccgcgcgtgcgcgccgcgcggtgttttgcacctctcggcgaggggtccccctgcctgcccacacgagatgcacccaccgtgaaaacggaggtgaaaaacggtggatgggatgcgggggaaatcgggggccgcggcgcgcccggcgtcccggtgcgcgtgccgtggctaaacaaacagctgccgctctctctcgctgccgattgctagtagtagcgcggtggcgagacgaaaccacatggcttttttacgagaggcgccgtgagggggagaagtcagcgaggttaggaggaggaggtctcaggtcagcaccgtccgtccgtccggcccacccggtgcggtggggacggcgtggcacattgcaacatgccggcctgccccctcacctgcctgtgtattagagcatccgcaatgataaattaatgtgctctctataaaacatatatatctcagcaatagattagattaatagtaaaccacctcaatagtatgtctacataggtatctatagctctctaatgcactgcctcgtttttctctatagactatctctatattagtagatagctttgctctctctctttatttaatctcttccaaatagaaaaatatgttgacatgcatctcttatagagagcctatatataatcattgcgggtgtccttactactgcgtttactgggattagagggagagagattaaataatgcatgggggagagggagagaggggaagggataggtagagtagatgatgctcgtcgtctgctcgtgcgggtgatgcggcggtgacgacagcgccagggcgaatgtcccgccgcattgtgggaaccgccgggccccgctgcacgccacgtttttgtgccgtgcatatatggggcctttgagcctttcaccctcttttctgatcatcttttgacatgtcctttttttttagaaaaaagaagacgcatcttttgacatgccatctttcggacaaggtaaaggttacaatccttttcatctccaggagtactagtactgaatttcataattcattcttctaccactcgcaaactagcacggtattcctacatccacaactgaaatttcctcttcatgtgaacactgacgaacacggaaggaaaaaataccataaatcctgtacacactaatggtctaattattatctaatatactaattaacatagtactccataaatcagttagaatcgaataatctacccaggatcatgtaatctcatgaagatgaatataggaacgccactgcaattgaatttgaagtacattcaagtactacaatcttgtgaaaaaaatatatttttatatagtagggatacgttctggcagaccaaaaaaaagtacccaatctatggcccatccagaaagctggagcttcaaatgatttgctccagttctttgagaacagagaaaagaagaaaaaccctgaatatatgatcatacctgtccaaaaaaaaaaagaagcttttgtaggtatacaaataattctactacagtagtgctactacagtcagaagacagaagaccttcccaccaacagcacaaattaggagatccaagctacaataacgtgcaacctactccaatgttgtgagtatgtgacagataatttttcagttaatacacaatcacacgccggccaataaacaaaaacgggtgagacgaggcccttgctttcagtgcccatgcacaagcaagctgccacaaccaggcaccagatccacgcaacaaaaaggcagtctccagtgatcccaacgccggcctgtcactcgtgtccgggtttgtttaggttaggtgtggatttgtttactccgcgccggtgcgcttaccaatctaggcttgggttgggttagctttgtcatcttcatttgaccagctagccattttattaagctccggccagggaaagacgccggcactttctccggtgccggctttgtgggtcttgtgtccccggagaagaagatgagcacacaatggcattttttttttgtttctggtttggttttgtgtgtttcttgcggtcaaagttgcctcggttggatggcgactaattatgagaggtttggaatggaaaactctattcctgtgtgcacgaacgtccttgggcatcggtactctgctgccatgggaagtggcggtggtggtggctaatctcaagtggaatcccaggtttgcaggaaatgtgtttggtgcggatgacaggtggggcagaaagtttcaacgtagagatagatgatgatctaagcttcgtgtgaatactgaactgtggcgttgcatcatgggacatgggataccctggaagtttcgacgattaattccttgacgtataatggtattgttcaaagtcaaatatcgtggatagcctgccggggaggtggtttactagttcaacaaaagacagaaaaaaaatgaaaaccttgacaggcagacctcgggatcataaaaacagactttgttttttgcgattatgtagttggaaattttgggacatcctgaccttgttaatgggatattttgggcttgcttgggagactcaacaactaggatcccagcccaatcactcgaaatgaatgggcaagtcctcaagaagggcgttaagccgttaaggtatttttggccttcagatgtatccatgggtcaaagagggacgttaaggccttttcggcagacagatgtatcaatgggccaaaggaagggaccagaattaagaaagcccgcatagtgagttgatggccttttgagcctatcctgcacggaatatacgtccaactgttgtccctcaactttacgttgagtttgtttgacatctttatctccaatttcagaaatctttacccctaacctatacaaaactgtgcaatttagatctcatagtagtatagatatctggtttcgttgatgtgacatcctaattagcaaaagaataaaaaaagtatatgagccccacaatgacagctgtcttcttctttcttgttttttcctaattctgtactcttcgtacataattaggaaaagcatcgtacgccttccttgtggcaatggggacaatgggaggcagctggccggagagtggggggagaggcgggcggctagagatgagggagggggaggcggtcgaccagggagaagggaaggtgactggtaggccttggagggagggagaggcggcaaagccgggggggaggggaggtggagggtggagggtggaggcggtcggtaggcctgggatggagggtgaggcagctgacaagtccaagcccgccggcaaggggataatcccctgcgactggtgggcctaggagggatggggaggtgccgacgggagatgggaaaggagagagacgaccggggagtccaagctcatcggtaaggagataatcccttgtggcctgctactcgtggactccggcaacatcggtgcgggctcgaaggccgaccgtgtcatgcagtggcttgacgggaaggagttgcgctctgtggtgctcgtctctcgcagcaggagcatgatgaggacctcgtgttcctcttctctcatgacgacgccgtcaagacgacgacgtataactcatgcctccgtgacatgtgcgtcaggtcgaacggctcgatgtcggtggtgtcctcgcacttagcaatccctctcgtcgtccacctccccctccctcccaggcacgtcagctgcctctcccccctctctctccggccgcctcaccccctccccccaggctcgtcgcccgccaatccccatttctttcgccaatcccctcttcttccgctagccgcctccctctccccattaggcttgggaaataaagagaagaaagaagagggtggctgacatgtgtgccacacatatgtttcttttttttttttctgactaggataccatgtaaatgaaactagatatctatactgctattagacttaaattgcattgttctatatagtttaggggttattgagatttctgtattggagataagggatgtcaacaaactcgacagaaagtagagggatagagagtgaacttattccatcctgcgctgataattcatgggccggagacagataacttcagagaatcctttctttttggtcgtcgtctaccaatagtttcgctttccccatttgcatactctgcaaattcagatcaagaacccgcacagaacgatgcaaatcccccacgaaaattctcgccctacatataatccgctacaaagtgcatcgggggatctcaatttgcaacaggagatcgaccaatcttccgatctaaggcacggattgatatgtatagatatataagcaccaacgaggaaacaggaagcaacaaaaaattcacccccaaatcaacgtgattcggctcacagtagcgttctattagtatgaaacatcgttcacacaaacaccaagccaaatcatatccagaagatgttctaagacacacaaaccctgacggaattattcatcataattaaagatcgattcgatcggccatactcgaaggcaggcaggcaggcaggtcggctagtcgtagtagagctcgaggcccatcccgtcgtggatctcgtagtcggcgagggtgatgtggtccttgtagatgttgtaccacttctggatgcggatcttctcggcgcgcgtccccgtctgcgccgccaccagcttcttcaggtcgccgatggtgtcgtcctcgttgcacttgacgcgcaccttcttccccagccggtcgttgagcaccacctcgatcatctccgctcccttcttcttcttcttcctcttcctcttctcctcctccgaccttcgaaagcaacacgggaatcgcggggcgacgatgatgaagacgacgagacgtgcgtttcggcgtggtgcgagcgagattggtgtgcttttatttaccacaagaaagtcggttcggtgatggagtcggtttggcgagtgggatcggaaaccgtgtcaaactgggtttccgactcgactggccggctattcgtggatgtgccaaaccagtcaaaccaaacacgcgagcacacctctccgattggaggattcagcctgcccagaaccgaccgaagtatgagatgtgatgaccggtgcatttcagcttttatacacgagagcctgtataccgacacgagagcctgagacagccgaaagaattcgctctaattattttgagcaagcacaacactaggaaagggcaaatttgatataaaaattgaaagatccagtctgagaccaaactaaccgagaaaaaataatcggtcactgattgtaactaaccgaatttaatatatctgtcttggttggccaaactggaaaaaacaaaaaaatgatggtaaaagcaaactagcagcacatccgtagccaacgtaaccttaataactccctcgtatctcagtaactcactcttatgtcccctccttcccatacactcctcacatcgtgccaccaccattgttgtcgatagtcgccaaaccactaggcgtcttctcaggctaagcgacttccttctcttcacgtttgatggtcaccacattgcacctcgaggcccatcccttcgatggtcaccgcattgcacctactctgctttgacagcaacgggagactataggtgcttggtggcgggcctatccgcatgtgatgggtagtaggatcttgggccaccagatccaatgcatctctaatgaccaatgtccccagtttcctcttgcctagtttgagctaggtggtgcttgagatcaaggtcaccatccctcttctcgatgctgatcgggtttacggtagatgttgtaacaggtattggatgttggcaacgacatagagttgcagagtgcctgattgtagttgaaaatgagccatggtggacaaactggaccagacgcgcacatggatttctctattggtaaggacctagcaaggtggttgtaaatttcacatgcaaccctttcatacgattggcctatgagattttgtagaaaatatttttcacaatatgggcttttgtcccacatacttccaactagccttcccctcctctttcaccatatcattgatatgagatatgcatatctaccattaagtaattaccacacactccttttgtataatccatgtgattgttcttatactaatagtccaatatcacatcctagtgtaatctcatgcaacacttcaccctaacgttatttccctaacttgctaatgattacatggccttaacttgctaatgattacatggctatacaagagtctaattagcatacgttcattgacatgataggcagtgaaaaccttatccaataatggctttccttcttggacctccacatgatgacacagaggcaattattggctatactttttccttttcgcttcctcttcccttatttcttctccaaagcaagatgctggtgaacttaccgtgcctcctccctcctcttccaccactttggcgagacaatagtgagcttgaggttcactgcttcctcttccttggcgagacattggtatccctttcttcctcctcatcctcagccaccaacccgcgcctcatccccaacgatacgacacaaggtcatcgttgtgcacatttttcttcttcagatctagccgcaggtgagatatataccctctttcatcggcttttgcaaattgcacttctattgaaaattcttgtagaaacttttagagatttgacttgaaagtttaaagtcaacaagatttttttttgatgtattgagataaaatttcttaattcgaaggaatggttatgtgaaaggtaaagttttgaacataaaactttttttttaagaaagtttcaataatatttggcaaaaagctttgatattaagagtagaaagttttatagatttgtgttcaaagtctaaagtagaaagttttgattgaagatttctaaaagggaaagaatatgaatgggaaaaacaataaatatttaaatttgtatagcattcgagaggaagcgggctatccatggtgatttttgcaccatgaacaactatgcatataggcttttcgtggcaattgctgtcatgatagctcgttgccttatgacctagtagagcacgattatggctaaataagttttagagaacgcttgttttcatcagaattcactctgttattagccctaccaaatgaggagctggtctgttatatatataactgtcacatatttatctttttaatacaaaagtataaattctagcctctatcacgtaggagtactagtttggtaatataaattttagccaatcataaagttttgtcttgtgcgccaacgccacactacgcgtttatttgttaacttggttttattgtagggctcttttatcataatatattttctaggcgtttctaaaccaaatagaatatttactcataaattatttttaatttcttcttttattttctatgacttatcatctctaactaaccgatcatggtagtgaagcctctcctactgaaaagaggtaacaaaagatggcagaaatcccgtcaaagtctggagtatcaggcatatctttctcccacactcttccttttgtaaccgaccaatcctccgttgttcctccggcgactcgcaaaagctagataaagttcggcacagagcaaggatttcttagcgcagcgtttcagcagttcatcgcccatttgttaccctcttttgggccgaaaaggcttctctcttttaagaaccttcacgcggcgacgcgctcccgcggctgcgaggaaactgtgccttcccttactgaatgtgaaacgacctaaatcagcaagtctgcatttgatcataactgctagtaatatagtctcgccattaagaatgacatagtgtgtgtgtgcgtgtcttatctgtttcgttaagaaatgatgcactgaaaatcttctataagaagcaccgaagcatagctaatgagcacggaacagtacaccctataagttcatagcagaaagtagttgaattgcaaatttgcagtggtagctcaccatttcaaatgtcagacgaggtcgagatgaggcaagccaagtgccggcaagactacatggcaattgttaagcaggtaagctatcgttgttctctgccattgcctaactgtgatgctggaccgcactagataactacagatgtcgcacttttgcatcgatcattgactctctccttctccctgtgcgcgcaacgcagagccggcagctgatagaaaagctggacgcaaagaatgaaccaaagaagaggcagaagcgatcaaaggtatgaattactgtaattctcgtgcgtatacccgtatttcttgtggtcgttcttttcttcagaagaaaccagccattctggttcagggtgaacggtaagattttagatttgtcacttccgttctgtagcatcacaatgtgtacaagcagagcttctccaacgccgtgtagcctaaaagtatttggatttgaattagtaactgattaagcagggatctgcttctgctacctgcagaactctgaaaaagaaaaggcggtcgccccgagctcgtctaagaaaatggaccgcgaagagctcgagaagaccatcaggggtttcctgaaggagctcgattcgactgaagctgctccaatgagaacaactggatgtacgagtgcaatgcgacctagtactatcgatcaggacttcaatactcaatagttacccccaacatttcaggattttgcacaagaagatgaatcattctaacattttttccccaatgtttcttagttctcccgctgttgaaactagatatgtttgttgatatagaattgcgccgcgacaccttaaacacgttatgtgcaacttacgacggcatccaaagacttagtcaccatagggaatgggtagatgtcgccgaatgaacactcggcagggatgctcttaggataaacgtgcatcggtttgtcctagtctcgataagtcagctatgacgtcctctaacatcgtagagacgagagacgacaagcaattgggggattggaggagaatcaccataaaaaagcacatagagatcggcactataggtgccagaatagttaaaaccggcatctatagtgtttttccctcttcggtgggttgaaaatacattaaatcggtatatttatgcaactataggtgccaatttttttaactataggtgtcgattttttttttataaaaaaaagcatcttaaatatattataggtgtcgggttttttaaaaaaatcggcacctatatcaaatcgagccaagccagccagcgggtgagaggggtaggagaactgcctcttttcattgataaagaaggagagtggtagaaccaagaatttatcctttatgccagttaggtgacaagacgactgttcactacctcgcgcactagatagtcgcaaaagagaatattgggagcaatagcgacatggacgcaagtcgacctgcaaacgaactagtggaacaccatcgacaatgaaaacatagaggataagtctagcatagacaaaacggatcccaaaaactcactacggtcgctcatcccttaggccagctaaaatttagaataagcgaaacggaagtcttctaacgaattgcatccatgccctgatgcctaccgtcttaggtggtgttctttactcctgaagatgaagattaagtttttttacgcaaaacgaggtgtattaacatatgattgaagttttaattactacaaagttgaaaaatagattaatatgatattttagaggaacttttatatagaaagttttcgcataaaacacgctgtttcatagtttaaaaagcgtgcaacggaaatctttatcttcatccaactcttgttggagaaatgaacgggacctagcgaaaatcaaggaggctaaaacttgatgcttcgcggggacagcatagcttagagacctcttaactgcgagagtaggcctattgtgtaatctcgctattgcttgtatataaaccttatgacaataatatttgactggatgaacacaaggtccagtggtagacgatggagatcggagactgatgcagcatagcttgcactggtgactggcgagagtatcgtctgctgtacacgttgcatatgattccaatcgtgtggtcctcccagtaaagttctatcattggtgcgaccgcgacctcgtggtcgtggcctcagtgtatttcttgtgcagatgctttcgccgggatttcggagcttttttgctgtgctcgatcagacgattacaagtatttttctggttttccaatgtgcgctgggtacgtactagtacgtggcgtaataacccaaatgaatcgaagcatccaattaatggacacaaatcttggctaaaagaaagtactaacaaggatatcactggtgaatgggaaatgacgcggcattgcttgtaggcgtagcctttgcatcatttttcccttgaaaactcgtctcccggtctccggtgctactactaccattggtgcgactttgcagttgtggtcgccgtgcaaactctccttgctactcgtatcaccctatcgcaggatgttgtttcaaccaaaccggttggcgcatatgccagcggcaacggatggcatatgccttcactccgctgtagaattggactcgggatgttgcagttggcacaaagggagaaaaaaaaaaggttggccaccaattatatccgctctgaactgctgatccagataaggacaagcagtcagcagctttgaggagaattcatgcattaatctgctccatgacaaatcgcttttactgcgcgtgtacgacgagcagtaacaattgcctttaattactcttaatcgtagtaaaaaattttacagtacacgaatgaaaatgacagtaatactaaacaaatatgtcgtgtttatcatcttcattctctcgagaaatagtacatgtcacgatgaatcaacaacaagcagctagcactaattcctctacctgactactacctcttctgatcctctcctgaatgtgccgagaaaattaagaaaagaaaagaaaaaggcccaaaaaaagagaagggcaaaagcacgaaacacttgtgcagttaagtgctgctaaaaaaaacaccaactaccaatagcactcgagagagttaaattaatctatcctctgttcgttcaaacaaaacagctcgatggatggaggtgacgtgcaaaagctaaagtgtcaggcctggaacccggtcttcttccacaccgcgtcgcggaccttgagcgtccggccgatccccatcccgtcctcgtgcaccgacagcgacgcggcgcggcggcgccacgccagctcgtgcggcggcagcaccgccacggccgacgccgcgtcgatgtcgtcgtcgtccacgtcgtccgcctcccagtcgccggcgtggtgccccctgtactcgtcgcccaggatcttggaccagtccggtatgttcaccggcagcgacccgtgcgccgccggcttcgacgccgccgccgccgccttccgccccggcggccgggcggccggcacctgatgacgtgccgcccggggtgactcggctacctccgcggccggctcgaacgatccccagatgtccgactcgtcgaactcgtcgaaaccgttgccgccacctacgccacggccgcgtgacgacgccgccgtcggcgcgaaccggctgtacgcttgctccgtcgccgccgaccgcgtgctcctcgccattgccgccgccgtgaatgccaagaaacaaaaaaaagaaccaacacgaatcgcggagcgatgcagattgttcacgaagcagtcgtggcgaccggagaatctgggagcacggcaaaagaagagagggaagggaagtggaagaggttgcgcggcggtggtttcgtcgggattttataggagccggagggacgagagcggaaagcggtaggagtggataaggccgtatatggattgacccttgtacccctgtctcgcccgtgtacagttatgtatttgctacgtggacgacacctacaacatctacgactgtctcgctgcgggtggggcccggggatcggaggccgtaaggtttccgacgcgtcacgtacgtatcctccgtatccggacttgaggctgtggctacgtttgggttttgtggggcaacgcctgctggcgcgctgcgattggccagttggaaacgtagtgggcccggtgtctttttgttttggataagtgagtccatcaacgattaagcgatgttggaaaagagaggcttatccgtaaccagcagcactgatttgggggagtttcatcgcgagttggtttctcactctctctagccaagctgctagtaacggagagtttttcctctccagctaaatacactagctacctaagctcgccacgtatagaagagacacgaagccaggtagatccggttatctggttttgaggcaaaatatgttggagtatacgatgcgctgcatatccgaacaagaccatttgattctggcagagacaagggcggtgctagttacagtatgctaggtgcgcctgtaggttagacgagcaggacgagacagtatggttgtttttttactcttaagaccagcagggagtaccactgaaccagcattcttctgggacgcgataaacgaagtttatccatctaattagcgaggataaggtgatcgcattatacaattaaggctggcaatgtccccaggaaggacacgtacgcgagcggccgcagctgcgcatccgcctcaccgtcgctttcggcgcggggagcaacatatgcaccgtcgtagtagacccagtcggcacgcgggtgtcggcgtacgtacgtgtcgccgccggagtggctcggcgggagcggccacgtgggctcgccctgctcgcgcctgtatccgcggcggggcgcaggcggattagctcgatcggacagatcttgtagcggtccgacgaagcagcgagctggccatcccgtttggcggcgatggggcgatccatgtatggatgcatcggtggtggctggcaatagtggcattgccgcagcggcagccagacgagatcgaggaggagatgagctgcggcctgtggccctgtatctatatatctgctcgtgccgttttgcgctggacatgatacgtgccgacatgcgagcgtgcgggcgtggcggtggcctcaattcctcgaaatttcccttgggaccccacgtgcgccggagccgtcggaacgttgtggttgcggcagcagcacgtgatgctgatgagccagttggtcgtctgatgtgaattactgacgcagtgacgctgtcgcgaactcgcggtaggatgcagggctgcgtcgaggcgaagtctcgagcaagcagagcagagagaacgggaaacttcttcagcggctcaacgcgcaaaagaagcaacagcttgaacgcgcgagagttgtcgaagtagtagtacaaacaggctatgggccagaggctcaagaacctttccaagtaggccgtttgatctattgatgatatgggctatggccagcccaatccggccgcgtattggtcgacatggtatcatggggcaataagtttatttaggggaataagttcacttagtgaccctcaaaagtgatcgaaatctaatccgccctaaaccataaaaccggatatctcgacccttaaactcttaaaatcggtgcaatttaacccccttgatggttttgaagggaggttttgttgacgtggtggtattgactgtgtctcctttacacgtggcgttgacgtggcgtttagatggtatttagaattaaaaaatatatgtgggacccatttgtcattgacacataaaagaaattgttagacccgtgtcccttctctctcccccctccctctagttccttctcccttctcgccgctccctctatctctcccgcggctggtggcgggcggcgagggccggagcggcggaggcgcgggcgtggcgcggcggtctgcgagcggaggagacgcgggagtggcggtgcaggcactggagcggcggcggcggcggcgcccgggctgagctccaccgcctcctcgccgacagcgaccaggcgttctagcaggaggacggcgggcagcggcaagacaaaaataagcagcagcagatctccagttgcagggaccaaacatggaggggcaagacaaacaagcagtagcagatctccaggagcggaggcggccgcggcggcggtcgtggtggtacatggtccagatcgatgtcaaacggtggctacacaggaggaccatgttgtttctgagagacaattgcggcctgaattcactgtgcgaggataggtacatcaagctcacacgcttgggcactcatcgcattctcatccattatgccaggctgatgcagtgcttgtactacaacatcctcatgaacgaggttgggatgaagagctgggaggagtacactgagaaagatagggagaaggtccgggcgctgatagacaacatcgtcgagctctgccgtagttcgattcccaggtcgccgcacgacgtggttcgcgaacgtcgacgacgtgagcagcgtcggatcgtcgtcgacgacgacgctcgccgccggagctccatgtggtgtcgcgtttttgaacgggggtatcggatggttcgccccagttgcatgtcgtcagggcgtttgctttcctcctccgcgtcgacccttctccgcggcaaggagccgggagagctatgctcgggtgccgccgccgtcgccgctccagtgcctgccgccgccactcccgtgtccccaccgctcgcaggccgccgtgccacgcccgtgcctccgccgcttgctgccgtctccgctcaccgccgctcaggccctcgccgccctccgcgggtgagagagagagggagcggcgaggagggagaaggaaccggagtgaggggagagagaagggacacgtgggtctcacaattttcttttatgtgtcaatagcaaatgggtcctacatatattttttaattctaaatgccaactaaacgccacgtcaatgccacgtgtaaaggagacccggtcaataccgccatgtaggcgccacgtcagcaaaaccgcccttcaaaaccaccaagggagtcaaattgcaccggttttaagagtttgggggtcgagatatctggttttgtggtttagggtcacgaattagatttcgatcacttttgagggtcacaaagtgaacttattccttagttaggtctcttattttatcatcaagtttagatcacgtccttgaaccataatagcttatatatcgtctcttaactaacaaaaccagagtacgcgaggtcctagggaaatattgagagacacgatatatctgatatcatggttcaaccctcgtcaccaccaccgctccatagtcctatgcactgcaatgacctcattcgtagtcatggtctcggcgaccagagatctcttcctttgtggagtggcccggtgatggccaccacagtgaagctgctcggcgttgggttcacacgaacacaacattctttatgggggaacagtggaagaggatctccttgtcgtgagggcattcacgaggcaggcaacctcgccatcgtacaaggcagcccaaccgtggccggagccgacgcaacgcttcattgtcgtgggagagaggatgatcgaggctttggtggagagtggaggacatgcactaggcagagacatgtaagcgatcaagtcggatgagtagcgacaacaaggccatggggagggaagcacgctaggcaatgtagacgactcgggcacaagtatagatctggatcaagcggctggccctcactcttctccctactggttgctggccgtcgccattgagcttcccctcatcgaccgccaccattatccccaccaatcgccgctgtcggtgacatgggaccgggagtatcatgacttagagacttgaggcagacacgatcacccacgtggcctaaccccctcgggggggggggggggtcgggcccgagggtgatacggccgcccttctctttgtctccccgaggggtcggaccgctcccgtctcggccccgagggccgaggcgccccgaccccttgtgggttttgcgccgcgtatatggggtaggtgagtatagcggggctcacctaaccacatttattgcggtttggacgagcgcgtcacgccgcatgtaacgcagtgcagcgcactcgtttatccggtctgtgaccagtcacagaccgatcagatcgtgggttaggtggcgacaggcggtctgacgcacgcctcgccccatcccgtcaggatgagagcctccaagcactcgtccctagccggagccggcgtgttagctcctggagatggcacgttggtcccggtcagatatataccaggcttcatcctaaccattacaagcaagacattgtatgaagaggggcgaacatgcagattgataaactgacgcgtggtggacaagaatgaccgatttgtgaccggtctgacactggtcatgtcgtcagcagacagccatgttcccacgtcgcgcctgcttccggcggaagtggaggtaggtatgggccgtcccatcagaaggtcattcggacggcaaccatacaagtctccgtctgtttatgaaaagataggataagtccctacaaaaaagagagagatggtgcatgtggtatccccttgaggtataaaaggatgaccttgcccacttagaaggaggatctggaggggggatccagaacgatcagagagggagagagtaagagctctctggttctccagctcttttgtagcttcttcatacatagatccaccaaaacacaggagtagggtattacgcttctcagcggcccgaacctgtatacatcgcccgtgtcttgtgtgtttccattctcgcgaaccttccacacaccgagagcttagaatctcacccagggcccccggccgaaccggcaaaggggggcctacgcggtctcccggtgaggagccccacgctccgtcagccgccccctagccctggattgagataggaagagagggggagaagtggaagaaattgggatgctgacatgtggggcctacataggtcccacgcggactcagccgccacgtcagtcaaaactagaagtaatgctaccttggtacccaatatgaaccgtttttgcaacattaggggtgtgtttatctggtattccggtatagggatgattttaaaactagatgacaagatgaaggacctgaagtgaaccatttgctcttatgggctattactactagtataggacttgtggtgtgctaaagaggggcgaacccagtttgttcggctgggccgtaagaacttttctctgttgtacatcctaaatccattacgttcaggatgttcaagtttatcgcaacatcacgttatatggactttgtagcctcgtccctggaaagagttccagactacaataacaccaaccctattagagcaggtacaatagcagactataagctagccataaacacatttcgagcagataaaagaggagagagaaaagcatcggactaaaaatttatagccagttacagcacggtctccaaaatgcatgtgtgcatgacatgtgggatcatgtataaattctatagtatatgtttatatgtaactattgtatgaatttgctattagattaactatagacgattaaaagccagtagttggctatactattaaacttgctattattcggtagaaggaaaaccaagaagttgacctgcgaaagaagtaccacttgtcaactactagtaatcagtctagtatgatactgcacatcaatctacggattaatttgatctcagatgaacaaataaccttatctttttgtttatatttatacttatctgctaaaatttaatttttcaaccttaaatttaaagccgattttgagagtttttttatcaaagtatttttcatttgcagatataccgtttggcgaaacgatggggcttaaaacttcgctggctcaggctcttcctctcgagaggagacgagaatcatatgaatccacctgtggaatgccattggctcgccgtccttttcgaacaccgcccctcatgctcacacagtcacacagccgcagcttaacggttcaatcaatcagtacaaccacaccatcacaaaattcacaacgcagacgaatcctgtggattgcatacagcatggtgagtgaggactatatttgtctcctatttatctcttgtcctgcgtttctagcacagttgcggcgacgcatcgtcagaaactcagaatgattgggagaccggggccaccagcccaccagcgaccgtgacctgggccgcccggctcttgccagccacagatgagcgtaggtggcagcgccggattggccggccacggcgatctgaaggccaccgttcacccacgcgtcctacgacatggacgcatggaaataacacttacgtcgcgcatctcgagaggaaaaaaaaacgtgaatccgaagcgaaaaagaaacggagaaaagggcagcaacaggatgtgatctccttagaaatatactccggcagacaggagaacgttctgcgcctctccctgtcttgctttgtcgcgggcgtctttcctcgcagaaagcgactcggcagagggatgagttgtggtaaccggaagagtgttttagagagaaggacgacgacgcaggccacttaatcatgtacagggaagagaaatgcataattatgtacagctagctagctaggagctagtggagagcaagttcacaattcatggagagacaaccagtaatgagaagttggccatgaagaatatgctctctgcaacgctatttttgttcatggatcataatgcatggcttttgttggggtttggtgtctgtctctaactctcttcacagctggtccttgggacagagagagaccctgaagattttggccagaaatttctggagatttcctttgtgggagaagacgagctacgacagctaatgctgtcacctcttacagcttgtaggttgcaactaatcgagcctggtgataagaatctcaatttgtaagtagctacagcccgttgtctgcccacgaaacgattcgctgtctttgttattattgttagcaataaagtttccgagcatctccattggtggataagtacgtatagtgtatataaatggctgtacaggataagatttctaaaagattaggctacttatacctgtttctaccatattacgcttaggctaatcgacacaacgatgtgctgctgaatttcgcttgcacgccagtgtgctcagttatgcacagcagaagaaatcaaacatgcatttggcatgcaataaaaattcagcagtgaactatgaacaactgagaagatactgttgaatagtctcacattggttgtgaaaggacaaaggacctaagatataagtgggggagcccctcacctcaatggctagcttttgggttgggaaaggccctttacgattctacaattggtatcagagctagactaggttaacatctctggtccgatggacacgtgtgaaggcctgatggaccgtgggtgcctgcggggtctgtatacctgatggaccgtgggccggggggggcccggatatggtgaagggctgagggacaccaatgtgtgaagggggagattgttgaatagtcccacatcctcacctcaatggctagcttttggggacaccaatgtatgaaggggaagattgttgaatagtctcacattggttgtggaagggcaaatgacctaagatataagtgggggagccccgtatacctaatggaccgtgggccggtgggggcccggatatggtgaagggctgagggacaccaatgtgtgaagagggagattgttgaatagtcccacatcctcacctcaatggctagctttctgggacaccaatgtgtgaagggaaagattgtcgaatagtctcacattggttgtggaagggcaaaggacctaagatataagtgggggagcccctcacttcaatggctagcttttggggtggaaaaggccctttacgatcctacaaatacatgcatgctaactactccagtttattatgcctgaccatagccgcccttttagctcttcaaaccctagctgaagtcacatatacagtggctttgctgaagttcagttcagaccaatttgttttttcccggaacagtatatgtaagcacatcacttagaataatccctccgattgatcactagccaccagttaggttcatgagtgacataatgatgaggctaagtcggttgtggtcggcaaattctaacacaaaaaaccctaaccagaaaccattaatccccttatccttgactaatctggcactaatcaatccctaaaccagccatcattgagcatatgagctcgacctgtccgtggcacgagtcatcctctcgcccccccatatatacctctcctacctcttgacaccacactcaaccgcagcaagctgcacagagctagcgttagcttggttagttgttcttagcattctagctagctcaatggcgaaagacattgaggcgtcggcgccggagggcggcgagttctcggcgaaggactacaccgacccgccgccggcgccgctgatcgacgtggaggagctgaccaagtggtcgctgtaccgcgcggtgatcgcggagttcatcgcgacgctcctcttcctgtacatcacggtggccaccgtgatcgggtacaagcaccagtcggacgccaccgtcaacaccaccgacgccgcctgcagcggcgtcggcatcctcggcatcgcctgggccttcggcggcatgatcttcatcctcgtctactgcaccgccggcatctcaggtcccaaattaaaccgatcagatcatgcacgctcaacacaaaactgaatcaaggctagcgaaaggaacttaacacggttgtgtgcgcgtgatcgagcatggtgcaggtgggcacatcaacccggcggtgacgttcgggctgttcctggcgaggaaggtgtcgctgatcagggcggtgctgtacatcatcgcgcagtgcctgggcgccatctgcggcgtggggctcgtcaaggggttccagagctcgtactacgcgcggtacggcggcggagccaacgagctcagcgacggctactccaagggcaccggcctcggcgcggagatcatcggcaccttcgtgctcgtctacaccgtcttctccgccaccgaccccaagcgcaacgcccgcgactcccacatcccggtgagttaattatacgtgtgcgcgcctcacgctgcatacttgcacactgacgcatgcactgtacatagtagtatacgctagtgttactgaataaggcttaaactgatactcctactaattaacgctagccaaccactgctgcacacttcctgaccgttgatagctactccgtactttagagttgattctagtgaccaaatggcagggctggatatcgattgatacagtgttgagacttgaggaagctgttgaatatggtttgctagctttgcataggaagaacgtacttaatttaatttagaagcaattttacggtttttaaggagttaacatgagatttttcactttttatattataaatttagtattcataatagctttagctaggtaccaagagaactgtaaaattgctcttaatttagtgtttagtcctacttcagtatactgtagaaactagatatattatatatataatcatgaactatataattagtatggagaaaacgtttagtacagctgcccgtataagacactcatagagtagcactgtactgaactatgttgatgcacagtaagactttgaacagttctcccagatcatcaaagctttaagaaacactacagctaattttcagagacttctagctgcgaacttaattagcttcattaaaatagaaaaaaaacaaaaaaaatagttaggtggaaggagagtatataacatttaacaataaataaataattaggtggaagaagagtttattcttgttttctgacgaaataatcgttttggttgatagctaggtgaaagaaaaacactaatcatcatcacaacacaatatcaacattctgtaatccggaaccttccactctcaaaattaaactaccacgccaaagtttgataaggtcacaaactacatacgtaaagtatatgaaccttttttgcctttaatttataaattttggtaatgtactggtaatcaaacatatacccaatttaatttcctttcaaagctaaaccatcccacccctcgccttcgcctgtataatgacagacaggacttcttcagaagataactctcgagtcttacattacctgattaaacagagtgcagtagttaataggccgtgcaagttcatgaatcctgacaaattaactaagcattttaatgacgcctaatttacaaattaacttaatcagacaatagaagtgaccctaattgtgcattacactccagtcaacatcagacacctacgccgttgtatcttcttgccggatatgcattgctgcattgcatgccaataaacagataggacgattccctcgcgtaggcagcgcactgttagtagtccctgtcttgctgtcgatcgtccgcagcaaacgtgaggtggcaaatcgcaaatggtcggtacttaatgaggacatatattgatctatggataggaacaaagagcaaaattccaagagaaatttctgacgatatgaaacgaacacagcatcctacagatatacttctccttcagataccgtgaaccattcatttccaggaccacggacgattttatttttaacagaaaaaacataatccactttgggtcacttttgggttggagatggttttggaacgaaataaattattgtactctgttttgtcattggctgtttgacatcagtatatgtcgaacatataacatgtttgcatgatgatttttgccttaacgtttttgttgatgtgttcatcaggtgttggctcctctcccaattggattcgcggtgttcatggtccatctggccaccatccccatcaccggcaccggcattaacccggcgaggagcttgggaaccgcggttatctacaacaaggacaaggcctgggatgaccaagtgcgtacccctgacttagtaattaccttgattaagctgctggagtagtagtatcactatctactgagaacaaactttggtcacaagtaaccatctattagtacgtgttaacaatatttcaaactaagtagacagtgacacacacaggaaatgtgctgacttattgctcatgctcattagctagctgacaaatgcatgaataaacgaacggctcaggataagtctgtagaaaattaaaagaagtggctggtgtcatttgatcgatttgtttagtgtaatttgtctagtttatgcatgacatacgcaatccctgaacgcaatatacaacctaatccccactacctttcagccacctagaagatgccaacatctgcaaccacccgtttgccgtacaccgtgtcttgatcgatcatttaactacatacgcttgctggaaccatgactaatcaaatcattagaagataatcagccagcaataacaattggctaatgatagcttgttactttggcgataataagttatcgtttaactctgacgatgatgttatttgtgtttgttcagtggatcttctgggtgggccccctgatcggcgccgccatcgccgccgcctaccaccagtacgtgctgagggccagcgccgccaagctcgggtcctaccggagcaacgcctgagatcggcggcggcggcgcgcgcgaggtggcgctgaagtgtagatacgcgtacaagatggccgcctctgtccagcactagatcaacgaattcagccttcgcatcctgcatttcgcctcgtggatagattctactgcactattatgtactatgtatccatgcatatggtctccattcctttgaactatgtccgccatatgttgcttcccgctggtgcttccaagtttggttaattttccttcacattctgcatgtatgtaatattcatatggagaatttgtgaatttgaagatcatagttactattatgtgcgatttattaagtactttctgcatgcttgtctgtggagatgtaaattaggcaattagctttgtgtgttttcgaattgtgatcttgcgtttctatctctatcatcgatcttcggctgcgtgggagagtgagctttatgaattcaggatgacgattgcagacacaaatcatgcgttgatacgaagtaacaaactcgctgcataatttcctactacttaaaggaagagcaacaacaaaaaggagaattcccttcaaaagcaaattttctccttcgaaaaaacaacaaaaaaagagaaaaacaaagaggaagagagagagagagagagagagagagagatatttttatgggcctctttataggccaatatgtctaacccaacatgggctttacttctgttttgtcgtgtctttgggcttgcatctggaaacttcggcctgcacgagcccacggactcatgtagaagggccacgctcctttgctgggcctagcgcatcggcgaggctggagatttaccgagacgaaggctttgccgttgggtgttaggccaacgaattttttttatttttaactttttttattaaaagttttacaaaaataattttctattttgaaaattgacggaagtagtcgcctaccgccctctgggaaggcgatttttaaaaatcgccctcccagagggcggcgaaaatgacgtggcagacggccgttcgctctcgggcgacggccgtcaacgaaatttgtaggcggcccccttgccgccctccgcgagggcgattttgtactgtgcggggggccgcctgcaaatgggcggcgagggggggcatggaattttgcaggcggcccccttgccgcccttggcgagggcgattttgtactgtgcggggggccgcctgcaaatgggcggcgagggggcatggaattttacagccggcccccttgccgccctccgcaagggcgattttgtactgtgctctatatttttgtataaatatcaatagttatcaaatctttttatattgaaaactatacaagattaaaatctccaagactggtaaaatacaattttattattttttagggcatatttggattgttaccgtacaaatattttgttaccgtacaaatattttattaatttttagggcatatttggattgttagtgccaaatttttcttcacgaccaaatatttggtaaggtaaaattgcatttgatcatatttggtttgctgccaaaatgtaaaattgtagtgaagaatgttctacataatctcaaatctagattacgtattaccaatgaataggcttccattttcgtgtgttgtgtgctagtgggaaagaagatatgaagaggttgccttcatattgtcaattatatagcgtcgttttcactgcaatatatgtgaactcaatgagatacattattcattagatgtgacaagacgatcacgcgtgggcgtgattcacttgatgtaaacaggcagcgccgaaagttgatagtgataactcgagctgccgcttttcatgtgtgctgttgtggactgtgcgcgctactggatctgacactaccgtgcagcgccgaaagtgtgttgtcgtgagcataagttgttctagcaccatatgaataaaaagaactatgtagacgagacaaacacaagtagtactgcagtagtaatagcaaaagtagtactgctttacaagtttgtaagccaaaagaaacggtcacataaggactgaagaggtagaacactactaacgaggcctcttacccctgtccctcctaccctgcgccctaatgtgcccgtgggagtacgtgagtcggtccgggggtacggcacggccaacccgtcctgcctgtacaggtgtgacctctggctgctcctgagtgtgtgcctctggagctcctccaagctgagaggagcctagtacgtcgtggtggtctgcaccgtgcaagtcgtcgtcgtagaactggctagtaggaccagtcctaccggcgtgagacgaagaggccccagtaccgaagatcccggctgcaaatcctgctggacaaggaccatcagtttcgtacaggtatttaacagtattaataaaaagtaaagtaccgtgtgggcgagggatcgacgctccgtgagaggaagagctggcgaacgcgcccgaagaggtggcgaacgcccctgcggagctcgtggaagcgccggtcgtgcctgcgaacgcgctcgaaggcagacgaggtcctgcgatgaggaaacgtgcagttaaaacatggtgacataatcgtgcaaaagctgaaacaaaaatgaactaatatctgggctgaactgtaccgtgcgaaaccggtgctgtaggtcgcactgatccgaagctaggggcgctcgaaggcaaacgaggtcctgcgaggatggatcatcaagttacgacggggtgatgttttcgtacaaaaacagaaacaaaacttaagaaacctctgggctgagcagtaccgtgcgaaataggtgccgtaggtcgaggtcctgctccgacggtaggcgcgcgaggccgtggttgtaccggaccagctggaggtacgacgtccacggcgctgcgacaggagaagacgcgcatgaccgcacgcatcttctcctgcatccggtcgaaggtcaccctctgctcaacgtcagtcaagtgcaaacctctgttcaacctcacttggactgcggtgatatcggcactgatatcccgtgcggcatcagcctatgcaagatggaaataacaaattcagtagttgccctatattatgcaagataaatgaaataattgtaagaaataatacaaattggatgtaccgccatgaagtagtctcggtcacggtgcgtgggatacgcgtccgtgacagcggcaacgtgcggctctggggcgtctggagtgaaggtcacacgcgcacgagtgcgaggaaggtaccaacgaaggtagtcacggtagttctcctccgtgtgtgggaagagctcgttgatcacctcctctgtagctaacacccagtcgtcaacgtactgctgtacacgtggagcccaaagtgcgcctgctagctgtccccgtcgagtcaacctgtgaagagaggtaaattatatggctcgatgaagtaattatcataaaaatttagaaatgaacaatccgaactcacgagtggtcggcagggaggacggtcggctgcacgttgcccggaaacacctgcctaagtccgaactgtctcatcacacgctgcgggcagtgaggctcaacgaaaatgtcgaacaccatcggcaggatggtgagccagtaagcctggtcgcgtgtgcacaaggacgaaagtcctagcggtgctctcgcagcgacggcctcttctgtgtacggctcccagatgacgtcgctcggctggagacggtcaaactcgaacacgaagtccgggtaaccacgtctcacctggacgtgagcgtaacgacgctgcaataaacatgatcggaattagacatgttatgtgaagaaaaaaaaagacgactgataaacttataacgcagcgaagttgcactaaccccacgtcgacaccagtaagtccccatcgtgggaccgtcctctggccactgcgcgctgcgaccaaccccatagggtgcgctgtccaccactggtcgacctatggcaaacctctcggctgcccaaagctgaagcaacatagggcagccagcgatgatcgctcccgcgtcagtcttcgtgcacgcctcacagagggcacggtacgtggctgctagcacggcagaaccccagctccactgcggcacgtcctgtggctgagcatccgcgatggaccgtgcgtagtggaccagccggaagtccacagcgtgcccgtgggtgctagtgaacatcacccacccgaacaaccacaacaggtacgcctcaagggagcgtcggaccgagtaatcatcagcgtcagggtgtagaaggtccgcctacaattaagaatgaaatgttagtacaaaacactcattcggtcgcaaataagcacgtatgataataacaacttatttacttacagtgaactggagcaaccaagccttgctaggcccgactgtagagtacggaggaagggtggtggtcggtcctaggtgtggaaggcgcatcacctgctcgaagcgcgcagtgatatcctccttccacccaaaaacaccgtccacgggaccaactgctgctcccgccagcggtagcccgagcaggtacgacacgtcctgcagtgtcggagccatctccccacagggaaggtggaacgtgtgcgtctcaggtctccagcggtctacaagagcggcaaggagtgaccgatctgcatcccaccgcttcgctgggtcacggtcgtccgccgccgcctcaacaagcctacaaagtggtagaaggcctgccgcacgcaacctgtatagagcaaacttcaaacataagtacaacacaaagcaaagttgagttgaaatgtgaacatacgcgtaccaaggaacgtgacgggggtcgacacgcaaccactcgcgcgacgtgcgtggacggaaggtgccgagctgtgcaccctcgactgctgacaggaacgagcggtggttcctgtcaatcccacggttcaacagcgccggtgtgtcgtacgccatacctgcatcaaataggttgatcagaaacatataaataattagttcaacataagtaataaatgttgaactaagcgaattactaacacatattaaacaagagtacaaacaaacaaaagtgtttactcggaacactcatcacgataatattatgatacaacaccgaataattcgcaatactactagtacaacaatagtcggaggtactcattacaacaacattgaattgaaattacacgatagaagtatttagtccgaacactcattacatcacaactgcattttatttcctaaatcgaaagcattgttacaccatggaatcgcctgctgcgcgacgacgccttggccttgcgcgcctgcttgttgttccttcaccaggtggtcgcctaccatcacttgcctgtccagatggactagcatctgcgccgcttggaacttctgcattcttcgggcatttcttgtaagtatggccgcgcagatcacacttgctgcagcgtaaagtcctcccacctgcttctgactcatccatatcatttctgatgcgtctagtttggcgtcgaccctttttcacccttaacttagatggatctggaatataaaaaacttgggcactcagcgttgtgtaagatcctgagatcccgaacccatatatctcctcactccatgtatgaaagattgcttctttcctgaaataatttgagacgtacacattgggagatatgccacaatcaccggcagcagcaagaacgtgtgagcaaggaaggtgatgaagcttcggcttcatacaactgcaggtacatccaccatccgccttcaagacacattcctgcacggcttgcttgcgatagataccacgcctgctcctatcaacacacattatttcataccgatgcacttgtgtgccttgagcaacaactcgatgtctccgtgcctttttgattttatcttccatgtactttgtcactacgttgccaaacactatgttgtcatcggccatggacggaccaattttcttgtatcgatccctaaagtacgcttgcgtgccgtgaaggatgaattcaacaatagcaaccaatggaagtacccgaactcctcgcattacccagttatacacctctgccaaattggttgtcattatgccataccgagatccatcggtgtcgaacaatagagaccacttctccttaggctcattctcaatccactgagtgaaatttctgatggacgaccctgacctccttctcattgttggtgggtcatcatgtaatgcaccaagaggtatgggaggctcgtcaccttcaactagtggactgcgagattgctcatctgtttgcttcgttgtcaactcatccaacttgtcccacaactcattaaatttcttctcttggttctgtgcacagagcctcttaaagagctccataagatgcttgttcttgaattgcttgtagaaatttgcacccatgtgacgcatgcaccaccgactccgaacatcaggccacttagctggaagtcccttctcatcccaaccgttctgcaagtagtcaatagcccgcaacatacccgcatgacgatcatgtataaggcaaacgttgggcctcatacgcaccactgcaatgtgcactctctctatgaactagtaccagctttcagtgttctcactctctacaaatgcaaaagccataggtagaacctggttgttcccatcacacccaattgctgtcaatatctgacctcggtatttacctatcataaaagttccatctatgcatagaacaggtcgacaatgcacaaaagcattgatgcaagcacccaatgagaaaaaggctctttgcagcacactctttgttcgatcatcaaccgatgtaaatgtatgtaggtcatagtacgtattattattcctctgggcaatggtggctaacaaacgaggcaaattatcataagaagcttcaaatgtgccatacctcatctcaatgatcttttgtttggctctccaggcctttgcatagcttatggtgtacttgaatttgttctcgatgtgcctaataattgattttggttcaaagccaatgttaccaacaacactgctgtacatctcacttgccacaaaagctgaagtgatgtttcggtgatacttctccaccccttgtaagtagcacttgtgctcggtcacaatgctaactttccaataatcattccatttacccttatatgcatggacacgccacggacaatcttccttcatgcacctcacttcatacacataatttgttgacttgaccaccctaaactctctctgcaaggaaactgcccaatgcttcaccgcctccttcatctcatccttatgagcatatcttgcaccctcaattacctcgttctccttatactcccagggtacatgatcaccctctgatataacaagtccagagaagtcctcatttgcccaatcagtggccattacatcaccttcctcatcggatgatgcgtcgtcgtccacttcctcattatccgaatcttccctctccatttcatcaacaattataccgactctctccccctcatccgccatgcccatagcctgctcctcccttggttgattttcctcattttgcatcgatggtccaacaacatcccctgcattgataggaccctctacatcttcggtttgcattgaaacatttatatctttctcttgtaccgacacaaatataacgaggggccatgaccgttcaaaagccatttccacataccgtctccaagcatcagtgctgtccatcggcattagttcccaaaaataaccttctgttgcacgactcactacaactgacactgacattgtgtagacttcttggtctattctaaatcctctcaacaaccaactataaattgactgaaatgttctctccgcaggcctatcgatgcccttagatgtcattacaaaatctgacagatcaacaccatctggaccaaatctaatatttccttcaccgtgaactatctgaaatgtgaccttacttgacattgtgcctgatgaaaacaataactgcgttaacctcgcatttctgtactacgccctaagttacattctctacaatattgttctctaaatttctaaaattacgttacattctccagatcaaactaaactacatcttacaattaacactactgtctatgtctcaattcatactattatattctatgctctggatctacacatatgtgctgtgtgctacagatgtgctaaaatatatggaactaaaactaaaacgcaacatatatactcaaacataacatattagtacaaatgcacaaaagatgtatgggagcatacctgtgatgaattgagcgaaccagcagggcttcgccgctccccttctgctgccctcccctctctctcttttgttttttttggatttttagtgaatataatgaaatttcacagaggagtgactgggctttatagggggagaggcaaaaatcgccctcccccagggcggcaagggggccgcctgcaaaattccatgccccctcgccgcccatttgcaggcggccccccccacagtacaagatcgccctagcggagggcggcaagggggccgcctgcaaaattccatgcccccctcgccgcccatttgcaggcggccccccccacagtacaaaatcgccctagctgagggcggcaagggggccgcctgcaaaattccatgccccccctcgccaccaatttgcaggcggccccccgcacagtataaaatcgccctagcggagggcggcaagggggccgcctgcaaatttcgttgacggccgtcgcccgagagcgaacggccgtctgccacgtcattttcgccgccctctgagagggcgatttcccagagggcggtaggcgactccttccgtcaattttcaaaatggaaaattatttttgtaaaacttttaataaaaaaaattataaataaaaaaaattcttaggccaactgccgcggcggccttcgtccactccagttcgcgtcgccggcgaacggcggcctccgcggatgccccccccccccccctccccctccacatggtctcgacgcaatgcacctgaagaggaaagcggccaagttccatcttgccgcaatgccgtcctgagcgtcgccgtcgcggatctcctcctgaagaccccactcctggggtgggggtgcgccgtacgcgtcgcgtgcgtggtgtggccgtgacatccaacagccgtggacgacgacgacggcgacgcccaccgatggcgagtcctgcccttgggtgtgcggtgggaaggggacttgcacgctcgccgccaggttcggcggccgggacggtggtggctggcttggactcacgagtggcctcacgcgcatgccacctgttcgacagaatgcctgacccaaggggctaccaccaggtatgctttagcatccaaattatccaatgttgattgctgttttgcttctccctgttttgcgccgtgtagctgaagttcacgtccgacgactagaaatgtagaagggaatcgtttgttagggcgtttagccagcggtaaggtaacagaggcgaccgcccggtgattgtccgggtgaatattgaacatgttgttttcgtttctaagaggttggcaggctaggacttaaagtgggcgtccaaagacaactagttttgatctcaaataattgtctaaagcttgcagcaaataggaatgtaaaattttgtacatgtactcggtcatggtaatttttaatttataagttccaaaatgacacaatgttgagttataagttgggtagggtatggtgggaaatgtaaggaacacactgaactgtgcagcgtgtccaaacctgttcgaagaattaagaaacatttaattatgtccttccttacaacagctcacatagcaacatatcaaaagttcagagaaaacaatgaaaaaaaaaagcaaacatatttcattacctatcagaaaattgcatttactgcacatcatgtaacaaaaggttctgctgttattgaattagcaggttagatagactcccggaactcttattttgtatacgatcgtcacacaatatctcacatcactgtggaagaaaatttaatacaaagagaaaggggtgggggtgaatttgatcacatggatttccacagtggttgctattatagaatttgcctcactttgtcgcttcagtgctaccaccaatgttgtcaagccatagtacaagttcatgagttagaggcctcagttttggtgactcacttatgcacaaacaggcaatatcgatcatctgcaccatttgcatctcaaacttcttgtcatacattgcacggtccaatacttcagcttcacagtttttttctttcatatgcaaaacccatgagaccaactcccgagctccctttggcttgcacatatctacaggcctctttccagttaataactctaaaagaacaatgccaaaactataaacatcacctttgaaattggctactgaagattggccgtactcaggggggatgtagcctagtgtgccaactagatcagttgttacatgtgtatcatagggacaaataagccgagcaagcccaaaatcagccaaatgagcttcgaaatcctcatctaaaagtatgttgcttgacttgatatcacggtggagtatatggggttggcatgacaagtgcaggtacgctaaacctctcgccgctccttttgctatctgaagccttgtttgccaacttaatctagatggaccatcaggcttttcatgaagccaatggtctaggctaccattctccatgtaagagtagatcagtagcctatcattgccaatcctgcaataaccttgcagaagtacaagattaggatgttgagcttttgataaagtctccacctcggctttgaactcacgctccatctggccaaaatcgcctgacagtcttttgatggcaatcgttgctccatctggtagtgttgccttgtacactagaccaaagccaccacaaccaatgatgtttgcctgatcaaagttgtttgtagatttcaatatgtcaccaatagtcattgccttgccgtcatccttgttctgaaacaaaagaaccaatgaagctggtgctaactcgagagcttcagttgtatctgcaacagccttaactatatagtcctgccttctaaagctactcttcaacacaagtacaacagcaacagacaacacaaatgctgctccaagtgcaatgccaatagctattcctaatatgacacccttgttctttccattcttctttacagacatggtaggagcatgagatgactggcatagtgctaagccagagcggatgccacagagtttggggttcccctcataagcagaacctgtgaatgttgagaattgccctcctaatggaattgcaccagttagattattgaatgccacactgaagctcgatagaaaattcagctttgttaatgaagaaggaatgcttccagtaagattattatgtgacaaatccaaggattccaagctcgacatgcctgatagctcatcaggaatcataccagaaatatggttgttactgaggtccaagacatgcaggttcttaaggttcccaaagcctggcaatatgggacctatgagcatgttgtggctgagaattagggagggcgggaaactgctaacctgattgtaccgtagccctttgcctgtcctgttctttttaatgaagaaaggaaaatagtcagtttctgtggattgctgtgagctgttgcatgtaagaaggcccttcatgcttgttagactgttcggaattcctccagacagtgtattattagaaagatccaaataaaacaaatgctcgagattgccaatccatgcagggatgttcccagacaatttattccatgacaaatccagcactttcaattgtgcgaagtttgctacccatgaaggtactgatcctgaaagatggctattagcaatgacaaacacttggatgttatgaaaaccatctattccagtcatcggcaaggccttcccatcattgaaattctttgtcagcacgaggcttgttaggcttgggcagccttgaaggacagataatgctgaggacacatttgtgaagctattgtttgaaagtgagatataggttagaaactgaagattcctgaaaccattagggatttcaccagtgaggttgtttgtggcaagattcaggcttctcagatgatggcaatctgacaaagcatctattgtgccgatgaacttatttgtgccaagatcaagtgagctcaattgtgacattgccgagcaattgagatcgatctgtccatggaatgaattgtttctcaggtacaacatcttcagtgatggtgaatgggacagtgatgaaggcaacggacccctgaataagttagactgtgcagagaaatactcaagcttgccaaggctaccaaaaacatttggaaggtatccagagaatgaattgaaagatatgtccagcttagaaaggctagacatattaccaaaccttggtgtcatcctaccagagagctgattctcctgcagagacaggtccctcagcgaagacagcctgaaaagatcatctggcaagctcccagtgatgctatttagatcaacatatagctcctcgagctttgtgcagttcccaaaccctgctgggaactccccagataggagattcgacgtgaaccggagaacacggatcactccatttggatcgcagatgctggtatcaatgtgccctgtgaacatgttgtaccccgcatcaaacatggcaaggagcgttgaaccatggagcgtgggatgctgttctttgaatgagttgagggatatattgaagacctcaatcactgggagagacacgttggtcgggaattcaccagagaactcattgtcgctaagatcaagacgttgtagcctctggagctggaccagggttgccgggacggccccatggaggttgttgctggacaggttgagccactggagctggtccagctgcccgagcgagactgccagctcgccccttagcttcatgccttggaggtccagcccgatgacccggccaccatcgttgcacttgactccaagccaagcacagcaattggctgtttcagaagtggcatttgggaccgtccagccgctgccgcttccgctgagaccttgcatgaagcccagcagtgcactagcatcaccagggtcacagtagctttgattcaaggagttggttgggaagaggaacagcaggtggaaaaacaagcagaaaaagaaacgccatggccatgtggtggtgagttgcatcatcaaggaacacaccatagaagaaagaagagctatgctgatggtgccgggcacggactgggcagtgaagatggcttctcgtttggtcttcttcaggagatatgtgatatgcaagccatttggtgcgtaaaactggcctctgctgggcgcttgcaccccaagcaacaatggtgaatcgacggaaaaaaggaaagagaggcgaggtaggagacgatacgacagtagtagggagaggtcagggggcggcgtggcgtgctccggttttgacctgtgattgtgtaggcactcagctggaggagacccaatttttcttcggggaattgattgtccctgtcaacttgctcgaacaatccatggtcggagatcttttgacttcttttcgaaattggcctaaccatccttttctttctcgctttccttcccttcggcagtttttattgagatgattattataactagcacgatagcaggtcattctaaggatagaacctgcataccacatggatattaatagatattatagaaccagataactacactattcgcagtccccttcgtgtctacttctcagaaatagtgaaagcgaggccgttgaagatattaccccacaaattgctcaaagggcattcagaaaacgctaaccatattgctgcaaacatcattacatctgcacttagttgacgctagccatggccataatgtcaaaatggaaatcatagatgaatggctacggttttatcaggggatagatagctagcagttccctataattgctaggctcgcttattagcttataagccgcgtctaaaatttaaattttcaaacataattttaaattattctagtcgttttttatcctcttctgtttttttccttggcttttgcaccactaaaaataacaaaaaaaatgaaaattttattctaaattatttttcatagtattgtttatttgtctacagcttattagccaagccaatcaatgtgacagctgaattttttcttcaaaaattggtactcattttttcgatccataactgattataagccgtaacggttatggtttataaaaaaataatttatagctaaaacttttgcatattcgtcattgacgatcgaaaagcaaatactaaaaataaattatcgtaagaaatattaaaaacatctttaaaattaagttttaaaatttatatattttttacagtagcttgtaagctgaaaagtatgcgatgttgtagctggacattctgcaggaaatttggtgaacgatggcgacatggttacggcttatgtataggaaggttggcaggaaagtcaaccgccagcggcaagagacacgtgtgcagccgctttcggccatgccaggccaacgccccgacccgactgctagtgctagggagaatacgcacggcatgcacggctccaaaaactcaaaacttggagcttgtacaatgccaaggaccggagaaatttctgctgctttgcgtctgagttttggtctactactactctactaggctcggcggcggcttgggtccaaagctttgtggttgacgaagccaccaagacaaggtggtcatttggtagtaccatgcggcctatgactatttaaaatagaggaatttcattgaaattttggtggaaatgagctgtcatatgaaataaattctcgtgtttcaaaagagtcttttgtttttgcgacataaaggagcccttaatttgattgggctgagggtctctctggaaaaatccattcaagtacaatcacctaattttttttattattttgaggaaataaaagagacaaaattggactcgatagttgataggtacattagcaagacggcaaacatgtgattattttaaaagattatgaaactttaactgttgctgcaattagattgcagatttcaccgcttccttgctaacagatcgctttcttgtgaaattacttaacagctggcgggcatcagtaacttccgcagttgaagtgtgtagactgtcttcttacaagaacaagaacatggacctatcaaaagtaaaaactggccagatacgatgcaactttactgatggcgtgcatttcgcctatatggccactcaggcaggcgttgccagttaccgaaatgctacgccaccacttaccctccaactatgtatccaaggtaactttcatgcttttcctttgcctccttttcttcacgaaagaattaccagtattgctcatgagacagaagggtggacttcaacactagaattttgcacgtcgttccactaaaaacaaaattaggttgggggaaactcctactgggggtagtaaaattatggatcgtggagggttggatgtgtgataaacgctgcgtgtaaataaatggtttcttagtaattatgaaaaaaaaacttgcacgctcaatatcgtgattttccaaatgctctgtgtcgtacatgcaatgaaaccatcaaattgttccattgttaggctacgagactaacgaagttactccccctcccctatttttatgtatataacgttattaacatacccttctgtcctaaaaaaatatctaatcatatttttatgtagttaaagtttgctctttttttttttacatagtatatgtttaaccaccggtcttatacgagtggagttgtaggtccactaagcacaactatgagtttctcatatttaggaagggactcggatcgacacgcggttataaaatggatccactttagttcgactgcgtccactctctagtgtatctaaactgcgtccactctctagtgtatctccttttagtagaagaaaaatgtttacccagaggttttagggggcagtcatatataccctgtgttagcaatttacttcctccgtttcatattataagactttctagcatggctcacatctatctatctattatattattaaaacagctttgaaaggaggcaccacgttcgctgtggggctagaaattcccatattaatcggagaaaaagaaaaaggagagttcaagtagaagtacaatttaaaaatagctgaaattcggaattaaaaataagcaatattgaaagaagtttccatataagaacccaatacgagattaatcaaaattcgaaataaaaaaattagaaaaggaaaggagagtccaagtagaaatacaatttaaaaatatctgaaattcgaaattaaaaataagcaatattgaaaaaaaaatccaatacgagattaattaaaaattagaataaaaataaaataatatctaaaactagaaaaattaaaagaagttcaaataggaatacaattttgaaacaactgaaattgaaaataaaaaataaaaacattaaaataacacaatacgatattaactaaaattttttaaaaaaattctgaaattagaaaattgaaaataaaaaataaaaaaattaaaataacacaatacgatattaactaaaatttttagaaaaaattctaaaattagaaaattgaaaataaaaaataaaaacattaaaataacacaatacgatattaactaaatttttttaaaaaaattctgaaattagaaaaagaaaaataagatatcaattaggaatacaatttataaataactaaaatttgtgataaaaataaagattattgaaagaaaagaccatctgaaacacatgacgagataaattaagtaacatgcctataaaaaagtagagtagtggcagttgatacgagatataaaaattgttaataaaataccaaatagaattctaattacgattaaaatgagagacgtcaagcaggccgtgaagcaaacaagtaaggcgattgccgggacttctagaaagtaaaaaaaacattgataatcatattcaatttttaaaatctcaatgataataaaaaggagaagcagcgggtgaggtatataagagtatagttacaaagccgccgacggttgacaggacttctagaaaataaaaaatgaattccaacggcagttatgttcgatttttagaatcacaatgacaataaagagttggcggtggacgggctgtagaggggcatagtggcatcgtttgatgggacttctaaaaattataaaaaaatgaaactacaagtccaatttttaaaggttttgaacttctaaaaagtaaaaaaacccaatgataatcatgttcgattttaaaatctcaatgtcaataaagaagggaggcagcaggcgagccatagaggagtacaatagcaaagccgctgacggtttggcgggacttctagaaagtaaaaaatgaacccaaacgataattatgttcgattttaaaaatctcaatgacaacaaagagaagagacagtggacgggccatagagtagtataatggcaatgtttgatgggacatctagaaattataaaaatgaaacccaacatgacaataaactctaaaaactataaaatccaatttttaaaggttctaagaagaatgaatgaaaatagtggtagattgagcaagcaaataaagaagaagatgacataaagggtagcaactggtgtgacttttaaaaactatataattagaaacacgacgatgataaggtttggtcttttaaagtcttaagacaatgaaatagttagatagctatttaataaattttaagtaaaatcatacttaaaaaatatatgattttgtttgggtgctagccgcgcaattgcgcggaccacctagctagttatattattaaaggaatagaaaacggagcctccatgttcactctcatggcctagaaattctcacattaatcggagaaaaagaaaacgcagagtccatatagaaatacaatttagaaatagctgaaattcggaattaaaaaaataaagaatattagaagaggagactagagtccatatagaaataaaatttagaaatagttgaaattcggaattaaaaaataagaaatattagaagaggagactagagtccatatagaaatacaattaggaaataactgaaattcggaattaaaaataaggaatattagaagtagagtatatagtccatatagaaatacaattaggaaataactgaaattcggaattaaaaataaggaatataagaagtaaagtatagattccatatagaaatacaattaggaaataatagaaatttggaattaaaaataaggaatgttagaagtagaatatagagtctatatagaaatacacttaagaaaaaaatagaaattcggaattaaaaaataaggaatattagaaagtataatatagagtccatatagaaatttaaaactaactaaaatttggaataaacataataaaattaaaagtagagtttagagtctgtataaaaataaaatttacaaataactaaaattcgaaattaagaaaaacatggaaagaagattttaaggtcaatataggaatacaatttagaagtaactgaaattcgaaattaaaaattaaagaatattaaaagatgagtttagagtccatataaaaatacaattagaaataataaaaattcagaaataaaaataaataatattggaagaagagcatagagtctatatagaaatacaatttaaagaaaatttggaaataaaaaaataaatattaaaagacgagtttagagtccatataggaatatatataatttacaaataactaaaatttgatactaaaaataattaataactaacacatatattaaatataatatgaacattacacattagtagttttgtaaagttattgcaaaatttaaaattatgttgtcattttaatatatttgaaaaatataatgagaaaacatatatgctattatatgagaaaaaaatataatgatgttagccgcgcaatctgcgcgggccaccatgctagtatatatatatatatatatatatatatatatatatatatatatatatatatatatatatatatatatatatattcattaacatatatatatgaatatggataatgttatgaagttttataacatgaaacggaggaagtatgttttagtgcgtatctcttcggtctcttttgcaaaaggttaacatatccgcgcgatcgattaacaatcatagcgcaaggttagcctgtcagctaaactaatcgaagtcgcggaacctgattcccgtacgtggctgggtactagctagccgaaatggtgcgccttatctcgctgtaaacacacaacagcacactggccactaacagccatcttccaattaaaccctgtggtctaccaccacaccgatcgattcgatcctcttccgaccggagataatgctagttttctcacgttagtggccaccaaagcctccggttccccccaatcagattttccgcgcaccctgacatcacccccaccgtgcccacgatcacgcagccgcccgccaccactcgcgcgctcgctcgctcgctcgctcgtgcgccctgatcgattcgatcagatgcagatagcgtcagcgagtgaacgcgcggggaaaagatataaaaaaaaggcaaggcaaaaccgcgcgagcgcgacgtgtgccacgccacgagcgacggccaccgccaccaccgcgcggacccgccatttcgcggaggatttcgttgtgctcggctcggctcggctcggccgctttatctccttgtcacgacctaaccaaccggggggtcgcggtcgcggctcgtcagagcaccaccacaccacatctaacacaacgttgaacgaaaatcgcgcggcgcgtgggaggcgcaagagttgtggccgatcagcgatttttttcgagttgtggccgatctgatttgccgttgcgtgactccaccatacagtggactccggttcgtccgtgccttttggtggaacgttaattagcgaggtggactggctggcgcgcggtgcgatttgggttgacctttcctgttcttttccgaatgtgtgtgtgcatcgaatcttcggttaattagtcgtgtgccagtgtgcgtgcagaatatggtaccgcattaatcgtctatttttatattgtgggtggtttggtaatatatttgctaaactgttagcttggtgctccatgtgtatatatagcagctattgcaaaggcggccttcatcgatgaccttaggttatgaatgtaagtgccacaagtataaaagagggtgaacatatttgttggtgattaacctgactgtaaagtagtggtactaccaagtcctccatgtcaaagaaaagggcacatacactagctagccttctggatgatctcaattctcaagcggcagaggaaataagccaacttaaaagttaaaaagggcagaccaacatgacaacttgcatatactctagctaacaaaaaggccatctatttgcatagttgaattatactagcactacaaatttcatcagtggtggtaaaagaggccggcaacactaggaaagaaataggactttggtggtgttaactcgtcaaggagtataaagaacgcatattcgaacgcgtgaaaaacccaaagaagaaaaagctcgacaaaggattagtgggggcacgtattatggtcagtaaattgcagctacctcgatcgattggtcggtttccataatcaaatgacgcttttataattttctacatattttgaagaaaggccctttcaaataatgagaaactcactatatcatattcacccctttgtttccagcgttcttagcttagatggttcggcactttgccagtaaatacatggtaaactgttcgctcactttcaccgcaaactttgagcttttgaagtgccaggtgacacggacagcaaaaggatagcataagctcgatgcctttatactctatgaaatatgtacgatcgcaatttatctaggcgctgcttttgcatttctgcaaatgtttttaaaaacttatctaagataggccgtccctttcttaatctttccatattttctttcggaataagttcactttgggtccctctatttgtcactcagtccgattttcgtccctcgaccgcaaaaccgggtacgacccgtcccccaacttacgaaaaccgggcaaacgaggtccctcagcggttttgaaggcggttttggatgacgtggcatctacgtggcttgtttgactaggtctccgtcccacgtggaattgacgtagcgcttacgtggcaattttcaacccgaaaaataaataaacctcgcgggacccacatgtcagtttcacatagaaattataaaaaaggtggggcccacgtgggccccacatgtcattctctccccccctttcctccaccgccctgttccaccgcatcctcgcagcccgcgcccgccggcactcaccgacgaggcgacgacatgaccccagccactgccgcagcccggcgaccggcggcaccacccacctccctaacccgccgtggccgctcggggtaagacggttcccttgttgctgctcccgccgtcctccgccactcccgctcccgccgtgacgacgcaagagtggaccacgcccggccgggcgtaggtcgacggtggcgaccagctgtggagcggagcaaaggccggtgacgagcgccgtcctcggtgccccagcgaacagcatgaggcgaggccccatcgaccaggctcggaggggatccggccacccggcaacggcttggagtagaggatagaggagatccagcgaccggcaacggcgtaggcggaggagctcgggggtcggcaagtggagagacgggcggcggcgaggggcccatcccccggcggatggggacgtcctgtggccacggagcccggcggatgtcgacgccccatcggtggaggaagtcggccggctgcagtagccaccgcaccagcggctccgcttgccttggcagcgctaccgcggacaacgacgccgcggccgctccccccgccgccgggtcgacgctcctctgcgcgctcgccgacgctctgtgggctcaacggctgcggcagctagagccacctcccgccgccccttcctctcccgccggccgccgcacgccgagcgccgctgcctctccaccgcgagagaggagaggggagagagagagttgaagagagggagatacgtgtggggcccatgtgggccccactatatttattatctgacttgtgggcccatgtgggccccgctattttaaaattattttttgtgtgcatctgacaggtggtcccatgtttttttattaatttttcaagatataatgccacgtaagcgccacgtcaatgccacgtaggacggagaactagtcaaacaagccacgtaggcgccacgtcagccaaaaccgccctcaaaactgtcgagggacctcgtttgcccggttttcataagttgagggacgggttgtacccggttttgcgtttaagggacgaaaatcagactaggcgacaaatagagggaccctaagtgaacttattccttttctttcgagacgatgtcctcttgcccattttcaacgatatgggctcttgcctcttggttgtcgctcttgacaaccgtgaagatgcagcagtgtccaggcccggtagaacacaacacatatcggcctcaattttaagactcggagataaattgaggagtctaaagtaaacttttctgtgtgagactgacatgttggtcccacgggttttattattttttccggatcgaattgcacgtaagcatcacgtcaatgccacgtcagatgaaaaccgagtcaaattagccacataggcaccacgtcagccaaaaccgtcctcaaaaccgccgagggacctaatctgcaccggttttgatagttgagggacctattgtgtctggttttccggatgagggatgaaaatcggatttgttgacaagttaagggatctcagatgaacttattccggcagcagatgggcattgagatttgagacaaaagcctatgggccgtgtgttgctgttcgccttgtatactcgaatggacgaaacgcgtcggcacactggggatttgatgtgcagtagcggacagtgttgtgcacggaacacgagcacgttcagtttggattaagatccataacttaaatctggtaattttagaatcaaacaagatatagaataccagtggctgaaagtcatgtgacttaagttacatagtataataattcgtttagttttactacttcaccgtctctttttcttcctcagcgcacaaaatcccacgtcgggagcatggtttgcaggttatcacaccttctcaatttctaaaatcacgattatttttacggtaaccgtatggatttcaggtaaacaaacggttaccgcgataactgttttaagttgaatgacgacaaccccatccacaacgggttagatgaaactttgatatggagtgcgatcgatcgatctgccaccccaaacgtggccaagatgacggtccacgcgtggcgcacgcctgcttgtcgatcggtcaggctcagggcgctcagctcgtggcccaatctcgtcacgagcgctcctgctgctctcctccgacctccgatccgcggcttgccagccaccagtttggaatcagccgtaccctgaatgctctcgataggacgggccccggcctgaccggctagctcagcatttcagcgagcatgttgcgcgtgcgagcccccccttcccctgtttcttgagcaatgttgcaacaacccgataaagtccacaatttgccatcagcggtaagcgtggcccgtgaaagataaaaggagtagcactatgctgcccacttcgagctcgaggtacacgtcagattggcagagccggagtggccgctgcccattgggccggtggcgttttgtactgttgctccagtagaatctcgaattgttagaatttcttttttttggtccacaatgcattaggggcggtgagctaccagcttagcaacatgtgaatcactctatagttttggatcatcgcagcttaaacattaatttgttctcgtctttattatctgggttgccctatataaacccctcccgtccatccgttgcccatcaaccaagagctagcacagcaccggtggcagtagcaaagtagcagcctcatcactcatcagtgagcgcagttcgagtcgccggtacagatggctccgtctcgtcgcatggtcgcgtccgccttcctcctcctggccatcctcgtcgccacaggtacgtgctcctcgtcgagcactacattggctgcgttaagcaattttttgcatgcacggatgcagtgcaatgtgtgatggttgtgtggttgtgtgtgcagagatggggacgaccaaggtggcggaggcgaggcactgcctgtcgcagagccacaggttcaagggcatgtgcgtgagcagcaacaactgcgccaacgtgtgcaggacggagagcttccccgacggcgagtgcaagtcgcacggcctcgagcgcaagtgcttctgcaagaaggtctgctagtgcatgctagccccgctgtctctgcagtcgcattgctcgtcggctgtgtatctgcagagattgtagtcgcgtgttctcctttgtctgttgttcatgacgagcttctgttcttggcttacaggctagttgagttgctttcgattatccttgcttagaataagtaataagtacgcgctggatacatgctccagcttagttagttgttgggtatttgcaagctgctgtcatgtaaggttccacatttcagcattaatgaattggcatacgtgatgaatctgtgtgcttacgatcgtttcatcagttaatcggcgtgttcctttcaccattggtccaaaatgagtttatcaggctttagcttgaagagttgttcagccgttgtcagcggagacgtctccgacaacaccgagatcttcgaggatggtggacgtcacccgtttcttgcataccacctaaataattatgaaaaaattctaaaaaaaaatcacaagataggttaatatgtaatatatcacttcacaaacatacaagttaaaattcgacttctataagttgtaacaaaaataacaaatcaaactctaactagtatacgtatattcacagtcagatttgttatttttgttacaacttgtacaagtcgaatttgaacttgcatgtttgtgaagtgatatattacatattaacctagaagtccacccgtttcttgcatgccacctacatgattatgaaaaaattccaaaaaaaatcacaagataggttaatatgtaatatatcacttcacaattttttaaggatttaaagttcttcttcacataaattcgctactttgcatattttatttcaccacaaataaaaacaaggacgctgtcaggtgattccacgtgagagcgagctccgatctaagttatcgatatcagcaaggaattttgcgagccggccagccggataagaacaacatcctctaataaaaaaaatgttcctcttaatcacatatacaaagtgctttgattaaagaacaacatcctcttcatctcttttcgggtccctcttgagttcttaattgggcttcttgcagccctgtgtcaactctcaaatggcaggggaggcgatattattctccgacgatatcatcgccaacatcctcgcctggcttcctccaaagaatgccgctcgtatgcggctcgtctgcaagcaatggcatgccgtgacatcggagcaccatttcatgcacacaaacttctcgaggagcagagacggccactccgttgccggcttcttcctcagcaacgagctccacaagaagttcagctacaatcctctacgcgacagtagcgccacgcatcccgctgctcccgacctctcgttcgtcccggagagcggctccaccgtcccgcgcaagatcaacgtcaccagctcgtgcaacgggctgctcctctgccgccggccgatggatagcagcgtcgcctccggggcgcgctggtgctgctactacgtctgcaacccggccaccaagaggttcgtcgagatacccacgccgccggacggccgcgggcgccacctgaacctggcttacgacccgtccaggtcgccggtgtacaaggtcgtcgcgctggggctcgccggcgtccacgtgtactcctcccaggctcggtcatggagggcggcgctccgttacgagcgcggcagcaacccgttcgcggggatccaccactcccggggcgtgcactggaacggctcgctggtgtgggtgacatcgcgctcgcgctccctgctccgcttcgccgtcgacgacggggaaggagagctgagcagcctgccgatgccgccggcgaggcatctgcagccggagaatcgctggatctgcggttacctcggggtcggggagtcagctggtgccggccggggccacctccggatgatcggctacacggaggaggagaagctcgccgcccgcttcgacgtggtggggatggcgggagactgccgcgagtggcgcgtgctgtaccgcgtcgacctcacgcgcatgaaggagttgtacccggatatacagcggaaaacgcggaagcaccacctgatctggccgcgccgcgctaggctagtcgactgcctggatctctggccgctgcacgtcgccgagcacggtagcttgctgctcttcggaattccgggcaagatcatggcttacggcatggaggaccaggcgatttcggtggtctgggaagatgccgcgccgccacaacctcggttcttccgctacgcttggttcgacttttatccgtacaccgcaggcttgtttgccgtgtaacaagttcagttttgtttgagaagaaaagggccgtttttgggctctttgtttggtggatatcaggatggcaggatatacgtgacaaatacttacaactaggcgctaaatgctgtattttgcgtcaaaaacacttgcgtactttcgatggcaatgatcttcgccggaggttgccggagctccgccggcacccacttgaaccgctccattgtagagcacggcttcattgcccttatgggcttatggcatatggtcttcttgcgcaaatgaagaagacgacaggtcgcgtctacggtgggctcggtgtggttgggctcctctattgtaaatgtttggcccattgcatagtgtgggtagatatttttgggccgaaattttaagctgagaaaggaataagtcgactccctcaattacacgtacaatctcattcataccccttaaccaaaataccagatattttgaaccctctacatggaaatcggtgcaaaatgactccctaatggttataaaggtagttttcgctgatcatggcgtcgacttgttaaattaaagttgtcttcaagtctcatgtgacgttacaataacaacgataataaaaataatgcgtgggacgaatggggcagggaccgttcctcccctttctcctctctctctactaactctctcgtggcttgcacgacagcgacaccgacgagctagagcggggagggtggtcagtggctttggcagatatgggcgtggcctaaggcaaagccatctctcaccgaggaggctgagtggcagtgatggctgagaagagggctccctgatggggctccacccagtgagtttgcgcagcaaccccatcccttcattgtgctccgtgaacttgtgtggcggctgatgccgccagagtcacatgcagtgcgaatgcgagctagtcgatctttctatgcccgaagtaatgatgtcgtgcccgaggcggagtggtggcctcgaggctcagcgatggtgcccttcgagacggagcggcagccttgaggcgtaacgagggacgcggcctcaacgcggatctatggctcgtcgtcaatgaggcgcagtggcggcacggcttgaggcggagcgacggcggcgcggcctcgagggaagggggctcgtcaaagcccctgagccgatcgcaatctcctccgcgcatatctcgccgcaatcccctctgtccgtccttcgctgctcgtcacccgacgtatctcttcaccgcaatcccctccgagttcaccttgtacaacatcagccacactagcaccacaaaatacccgaacgttttgcttcgaagccccgccatccagtacaccaccactgtgaactccacggtcagcgccagttggaacggaaggaacaccaccgtggatgatgtcatgctgtatatgcccaacgatatctccttggccaggatctcctgttcctgcatgaagatgggtaacgcttccatggttgatgacagcaggaaggtgaagaggccgacgggctccgccaccttctcacgcgggagctggctggctgctgcttcacctgctcggaagtggcgccagagcgcatccacagagttgatggagaacttgcggaggcgagagagcagcggagggtgtcgacggtgccttggtggaggacacaaccattgtcgtgctaggtgcatcgtgtcgggaaatgagaaaaggaggagagaatgtgacactgacacgtgggacctgtatgatgacgtagccggttagagcgggtcaacgtgccacgtcagaaaaaaaaaaaaccactctcaaatccgttgagggagtcaaattacactgatttcaataattggagagttaggatatctggtattgtggttacaggatatgaattagattggacatatatatatatatatatatatatatatgagggaaccaaagtcaacttatccgctgagaaagctactcacgtcccaattccgaatcagcttgtacttttgccgtgttcccttcttgaaatcgcaaggattttcatccccatcggtcacctcacaagttgggaactggaaacgccatggtcgcaggctccctcggcgcgcgagcagcgcagttgcactcggtgaattgtctctatcacacaattcacaagctggatgtctcgcgtacagaataatgtactccaaggcgaagtgagtaattaggccaaacggtaagacttgttcagtgttcactcatcgcagtgttggccaaaatagctcagctgtgtggcactctgatttatccggcgacgtggtaaccaagaattgccaactccaaataggaagtatcgtgatcgctagggaagagcccacctcgaccggctcgacggtcccgatcgactatctcaatttacccttgttcgtgactagaggagatgacctcgtaggctcgtacgtttacacttttggattgacctgaacagagacaatatggagtaccccagtatatagtatgtagcttcaaccaagcgcatccctgatccctcttctcgtaccaattctgctccaaatggtaaggaagatgacattccccgatgagatcatagccaacatcctgacacggctaccgcccaaggagctcgtccgcgcgcgagtcgtgtgcaagcaatggcacgccttgacgtcggaacacctcttcatgcacacaaacctcctgcgcaccaacgccggtcaccccgtcatcgccggcttcttcctcaacgacgagatccacgagacgttcagctacaaccccctcctccgaggctattccagccccgacctctcgttcatcccgaccaccgccgacacggctaactccgagacctacgtcaccagctcctgccacgggcttctcctctgccgccgccgtcgacgcatcgacggcgagcttggcgtgtacagagcacggcactacgtctgcaacccggaaaccatggaattcttcgaggttgacgtcccggccggcgccggtggcgccggccaatatctgaacctcgcctacgacccgttgaagtcgcggcaccagtacaggatcgtcgcgcgcgggcacgacggcatccgcgtctactcctcccggacacgttcttggcgcacggcggtccggtacgacggccgctgccgccgcagcccgttcgcggggctccgccacccgcgtggcgtcttctggaacggctcgctggtgtgggcgatgctgtcgcctcgcctcctccgcttcgccatcgacagcggggagctgagcgagatgccgctgccgccgaggctgcggtccgagggctggttccacgccgggtgggtgtacgcctacgtcggcgagtccggcggccggctgcaggtgatcgggtacaccgacgaggagaggcgggccgcctgcttcgacgtgctggagatgcgcgacgacgaggagggggagtggacggtgctgtaccgcgtcgacctgacgcgggttaaggagctctacgaccccggcgacgacgacggcgcgcgcgtggcgagggtgacgctggagcacttctcgtggggaggcgcgccgctgcacgtcgtgcgggggcccggggaggcggggcggcacggcgtgctgttcttcagcgtgcccgggaagatcgcgtgctacgacgccgagagccgggcggtctcggtggtctggcaggacacggcgacgacgtcgtcgccgaaacacttactgtcttacacgtggttcaacttttatgcctacactccgagctttcttcgtttataggataccaattaccaagcgtccgttttacgagtcgaaattatatacagatacagatcctgtacagatcaacaaaagtcagcctctacacggttgatctcacaactcgcggggcggtagtcagttttttttctcctttttttatcgttgatcggcgtcttgttggaggaaccggagcacctcctcgggcggcgcggcgcgccacacccgcgggcgcaccgccttgtgtccgagcctggcgaagccgtgcgccaccttgttcccgctgcggtacacgtgtgacacggccatgtcatcgatcagcgggagcagcgcggcgatctccctgcactgtctcaggtcctcctccgaccgcacgttggcgcggtcgcacaccacgtcgaccaccgtcttggagtcgccctccgcccagacgcgccgccacccgttccgcaccaccagctcgaggccgcgcctgagcgccgcgagctccgcgacggagctcgtcgctctgccgatccgctccgcgtagccgagcacgaatgcgccctcgtggtcgcggtacacgccgccgatgctcgcgatcttggtcgcgtgcttagacgacccatcgaagttgagctttatccacccggcttccggctttctccatgtcctcgcggatgaagatgagtcggcctgtatgttccgccgctgccctccgccgccgccgccggcaaggctacatgccaatacagggcagggcagccgtagcatgccaagaccagggcggtgcatgcgaagcatatccactcactgaaaaatgcgcgacttttacgtttatttcgcgtcacactacttagatgtataatttgagaggaactaggtgatgggaattggacaagcaaaaaactgtcgatttgaataggttttataattaagagcgagatggagctacgcgaatgccattgattcagcacgcaatctgccaagaaaggcgaggtatttgtgcctgccttcttcccatgaattgcccaaggagaagcaaccgttcgttgcttgctgcttcaaattagtgaacgctttgctgtaaaaagatagtgaaaatagcgaatgcttctgctttagggctcctagagctggcgtggttgaagctggcgtgaagatagtgaaaatagcgaatgctccatgatctccatgcttgtggcgtggttgaatctcgttgcctcgtgttgactgtttgtgaatattcggcggataaaataaggataactgccatgtgaaatttccgtttctatttgatagaatttttcccatggctatgtttagcacgttggactatttgagatggcctgctaaatgtattggaaacccctactgcagaattcaccatgggtctcattcaagctgtgtttatgattcgtacgcaaaaactcaagcgacgttatttcatcgccaattccaatggtgtttattcgatggacattttgctaggaaaaaaatacaccgaaggtcccctaacctgtcatagaattacaaaatcgtccccaaccgtaaaaccggatacaacgcatcctctaacttacataaccagtgcaaactagatctttcggcggttttgaccgacgtgacagctgacttagcgtgggacccacgtgggtcccacatgtcagcctctacttcccctcatctctccacctctcttcctctctcctcccctttccacgggtgacgagtacggtgggtgcggaagagctgggcggcgccggcggtggggaggaactgggcggtgccggcggggaggagctgctctagctgcatctggccgagcctcaccgccggtcatctcccttcgctgctcgtcgttgtgctgccccttggtgagttcctcgcgcgcgggccaacgggcggcgggggaggagctgcgcgcgctggccaccattgtcgtcatcgtccgccaccgcgccgccgaccgtcggacctcctcctccccccctgctgggcggcctacccagggagatgagagagagagagaaagagaggaagggagaggaggggaaggagaggctgacatggaaaggggaggagagaggaagagaggtggggaagtagaggctgacatgtgggacccatgtgggtcccacgctgagtcagttgccatgtcggtcaaaaccggaatcaaaaccgttgagggacttagtttgcactggctttgtaagttaggggatgcgtggtatcccgttttgcggttgggagacgattttgtaattcgatgacaagttgagggacctacggtgtactttttccttttgctagtactagtttagtgagacgaacagtgcaggctgtacaaggggcccactgcgacatttgctgaaagacctcaggccctataaagtttcaagatttgagcatttgtgtcaggcccatcccgtgcttgaggccatagcaatccgggccgcaagcctgagatgacccttggaatgctcttctatagactatagtgcaaagctatgtataaaatgcaagtacatcaaatttcttacaaatctaaagaaatactagttattcatcaacatacatacagcacgtttaagaaacatcataattcaaaccaaaggacaagggatcgaaggccgtacataaactgtacatggatcccttatcttatttcctacgtacatatataccggcaatctcctaccagtacttgtacaccgtcaaactaagctacaataaactaattaattaattaattaatgtactgcactcttagtcattaataattgtacatttactgatgatacacagaacggaactgaaactggccggccactgaatttgtgtgcgcctcatacgaggaaattactgaggccagtcttcttccccgtcttcttgacgtcttcctgcacccttcgcctgtactccccgaaggtgaacgccttgtaaggggaaggctccctgcacgtgccgatgggcgagtcgtacgacgggcagaggaagtaggcgacggagtatctctccgtcgtcgcgttcgtcatcaccctgtgctccacgctcttgtacctgttgttgctccacgccttcaaaatagaagtagagtcggaaaaacgtcaggaattgaattgaaccgccctaatttggttcaacgtggtagagtataagtttagtacggcctcgcatacactgtccactgatgcttaatttaatgattcacatttgtatgtttcatgaaaaaaaatatatagattttttttttaaaaaataagtttacaatggttaatacttagtaattaatcatgctttaatcatccactacattttcgtgctgtaataagcttaagcttatcacattcaaatggtgcctaaactgttataatttggtcctcccaagatgtaagtatatgctttagatttatgtactattttctgactaacgtagatattttcttagaacgtgttgttgggcataggcatagattgagagatttcttttagactctagttatagcacgatatagtagtacaatagtagtagtactatgttatcgtgaccgatcaagttccctagcaaaagtcgcaaatgtaccatgtgagtgtaactgacaagtcgatctttccattctactagcccttttgcacgatgtttttctgtcccttgatcatagcggaatccgcagccttttttttttttcgctagcggcggtacagcgatacacgcaggcaaggctgctgatagataggcacgacatgcccacaagcacaagtacgcaaagcgtgacgctgcaacgtccgccttttggagagccggaggcccggaatatgttcacggaatctgtactttttcacgcagacagacaaaccacctaccataggcagatgcaggctttgactctacaggttggaaagcattgccggccgcagccagccagccagccagccggccggccagccacgagagcctgtattgtactcgccttgtccaaaataattatgcacatttttttctcctctcccgtgcaaagcttcgtagaatatggagtagttgttgattgggtatatagcactatatatagcacgagtggtatgcatgattaggtgtaacagcaagttttatagtagggatgattgtcacccttaatattatccacatcatcaactaattaattattaggaggtaaaatatactacacattatctctaatatactagctccaatacaagaaaactatttgtttcatgcacttttcatccaatcagcgccatatttttctctttatgagggggtgactcatcctctttttctcttttgttttctctcttccatcttagtaccattatgcatatatggtatttagggatttgtgttgagatgtttatacaacgttggagttaatgggtgtacctgaaaaaggtctccgatgttgacgatgagggcgccggggatgggcttgacggcgacccagcgggagcccttcatgagctgcaggccgccgacgtggtcctggcagagcacggtgaggaagtcgctgtcggtgtgcgggaccaggccgaaggcgtcgtccggtgggaaggggcacggcgggtagcggttcagccggaggaagcacgtcgcgtcgtcgcacccctccgggaatcgctcgccggcggcgtggcccaggaggctctccgccagcacgcgcgccagcgccctggccagcctcgacatcgcgtccgccacctcccgcgtcacgtccctgcgccgcccccacacggcaactagatggtgttagttgcgaaatcagtgtactgtgttgttttgccgacctgaaaccctctctattctaatatatgttaggtcctggaatatttcttttgttggatcaaggtaaacataaaaaaaggtggattaacggtggtaacaaatggttttatatttcatatgtacacatgtttcccctccgtactgtacaaattgtttacccataactaaagagctcctgaaaagcggaccgtatttttgtgttgttgacttttgataacttcctacaactaaagtaccagtttaattagagtgtaccacgtgtttcaatttgtaaggattaaatcatagtgatcataaataatcaaatgttacatataggtgagtatgtttttaatacaaaactaatgttttttaatctttagacgtacgataaagagataaactcgtcgactcatgggtgggtaagtgcgttgtatatatatggatacggtgctagtggtgcgtgcacgcatatttttacgtaattgaagaaaaataaagtgtaactcatgctgtctcttaaaaaggtaagtgttcatggtacttggatgaccattttgcatcccgctttttaaaaaagagaaaaaaactaagcagaagcacagctttattatctttttttacatcattagatgcgaattagagagaaccccagcagctctcgaactacgtacttcatgatcaagacacatcattcgaaagagtgattttgctaggcgagcttattattaaccacaccgtaattaaagtgatatttccttttcacccggttcttattccgccgcactaattaatccaccatgtcgcaatcatataacccgatgtacgtcccgatcgatcgaataaattcatttagttacgcgagaccaaagaacacttttcatcattattcttatgtactttgcaaataccggtcagcttaattagcgctatagatagaacatggaagaatctgaatcacgcgtgcactacacacgtcgaagtgtcgactgactgactgactgacgagcgagctaactagcacgtgtaattcctccgtaatataaaaaaaataaaattttaattctagatatatactctcttcgtccatgtaaatttttaattttagatatatactctctccgtcgatgtaaagaaagtcgtttaaaataatgtttaagtcaaactttgagaatataaattatgaataactcaagttgttgagtttgaaaatgtaaaattatatgaatagatttgtcttgaaaaatacttgaattaaaatatacagacatcatttttcaataaataacttttatagaaataagaaatcaaaattgtgttttagagaccgtgtcgcttgtttaaaacgactttctttacgaatacggagggagtagctataagtttattttttatagcatgatggtgtatacacgtggagtatgtacgtacctgagggaggtgaggtcgccgtagttgcaggatttgccggagatgccggcgagcgggaggtggaaggcctccgaccaggagagctggcggagcgaggtggcggtcggggtgccccagcggtaggagtcgttgaggaggccggcgctggacttggcctcgaacgggaggcggaacagccgcgcctgctcccggcgcatcgcctccaggagctcctgcgcgacgccgtggttcaccacctggaagaacccccactccgcggccgccgccgcgatggccgccgcgcaggccgccctctcctcggcttgatgctgctgccccacggcggcggcggcggcggcgccggtcggcgccgtcaggcaaccgacgtcgatcatcgggagctcgcactccgacacgggctgcggcgtcgtggtcaccttcgtgcacgcgtcgtcgtcgtcgtccccgccgaggcggagcagcgtgtagtagctgtccgccagcggcgggtcggccgcgcaatccgcgatggccggcatggctgcctgggacgttgttactaccgatcgagctagcacacacagcttagctataagctagctgtagtgtgtttggttgagcgcgagcttgggggtggatgcgaggaggagcaaggcaagctaggcttatatagagagctcgcgggagttggccggtggtatcccgttggcgaggcgacctcgagggggcttggttggttggttggttgcgggttgcatgtacggctagcgcgcgggggcggcaaaaggcgacacttggaggcggccggggagacgcgtgagcacagtgtgtgggggtgtgtggtccgtgttttggcccgggccggcgcgcgcgacgagccgggcgatggcgctgtcaccggccgtgcgcgccgcgatgcagtgtgcagccactaaaaatcttcttattagttgtttttcgttgtgtgatctgcagttgagttgagcagcgcgtgtacagtgcgggggggcgtgcgtatatgcaacagtgaggtttctcgaagtgtgtatgtgcatcattgtttaatgtttactcgatctatcgcccccacgggggcagagtgtcgatcagagccgagctcagcctacctaggccccgtttagttttcaaaattttttcctaaaaatatcacatcgaatctttggacacatgcatgaagcattatatatagataaatgaaaaaactaattacacagtttgggaggaaatcgcgagacgaatcttttgagtctaattagtccatgattagctataagtgctacagtaacccacatgtgctaatgacgggttaattaggctcaaaagattcgtctcgcggtttccaggcgagttatgaaattagttttttcattcgtgtccgaaaaccccttccgacatccagttaaacgtccgatgtaacacccaaaattttttatttcctcaactaaacacacctctagcatatgcttgttgatcgacagactcaactactcagatgtcgtcagcccatgtttagatcacacgtaaaaacttttcacccgtcacatcaaatgttagacacatgcatagatatagaaaataactaattacataggttacatagattgcgtataaattacgagacgaatcttttaagcctttttctccatgatttgacaatgtggtgctacagtaaatatttgctaatgacgaattaattaggcttaataaattcgtctcatagtttacagacgaaatatgtaatttgttttgttattagtttacgtttaatacttcaaatgtgtgtccgtataattcaaaatttttacacctaaacaactaaacacgccgaaacctagctagtagtcatgacaatgagaccacaatgaaccaaggtactcccccgtcctataatataacaacataatatagaatgggacatattttagtactacgaatccgaacatacccttatctaaattcacagtaatagcatgtgtcccatactatactatgttgcttttattatagggactgttcactttgatgtcattttcaaccttaccaaattttggtaagttaccaaaaaaatagctatatttagtttgctgccaaattttggtaactatataagaaaacctgctaaaattttggtaagttgtcaaaattttggcatagtgtaaggttttttttttcatcaaagtgaacaggcccatagaatagaggtagtaattagtgttgatattgtttttttccttataatattataggattgggatcctataagattttcaaaattacatatttttaatatagcatttacactatgttgcataaactagagccaataataataattttgataaaatttaattgacttttaaaaatttgagtgaaattattcacaaaaattttaatccaccttattttaaataatactcttgtcaattgagatactgcatgcctataatctagtaagatcttatggaactaaatagtatgatagagatagaaaaaatctacgataaatagtattataggcctagttagagtttggtaatttgtactttgtagtgtgctcagcaacgtactgctccggacgccacaatctagaacgaccatactgccattggtcgagatatatctacatactccctccatctaaaaaaaaatttaggactagatgtgatatattctattacaattaatctggacagatgtatgttcaaattcattatattatgatgtatcatatttagtactagattggttttttattgtacggagagagtaatccggaaataactttctgccatgctacggtaatacgagtaatattacctccagcattttttaagagagaggtactacttttcgcacgttgttctgctccagtgtcacagactcccagtgacatttgcacagtattgtacacatatgcagataattcacaatctgtcaatttggtacatacagtacgtgagcacgataggataacgtgcgtgcgtgctcaattagttagatagctctatgtatatgcccaattaagacctttttaatgatcgatcgacatcgagttgcaggcaccaggctctttaagtcaaagcaaagtaattatttagtctggtcatgaataattacttcatccgttctaaaatataaacattttaacataataataaatcaaacatttttaactttaactattaataaaaaaataaaaaaatcaataatgtaaaattgatgttactagagttatcattgaacaaactattataatatgtaactctttttatttaaaatatattacttttataaatattgttggtcaaagtatcatctcggagaccatatcaaagtctaaaaatacttatatcttgggacggagggaatattatttaggatacatgttcaaacttttaaaattttaatcaccaacctttttgttatagaatattttattaaatcaatgttatttatattattaagacagtaactttcaagacaaatctactcatagtatttgttaaaagaaaagttgtaactaaccactaaagaaattattggtgattcaagttttaaatatttgagtttattttatttgtcttaaacgttagcaaatatttatgatatgatgaagtgacgcaggtactgtaatcgcaaaaaagtctgccgttgctggccaaataaagtttgataattaaggtgcattgtacgtatccggccttttcaatgcccaagaataaacgaactgtcaaggccggcagtttgttcctcctctgcaagaccaaacaaactttccaaattaaacattgctagcctttcataattccgaactttatactaagtaggagtactatttctagtcgagtactttctcagtcttaaaatatagttatgtctagcaaatatatagtacttgtcccagaataaagctatttctccacccacctccccctctcaaccaatcacaaccattcttcttcacatacctcctcttttcaacaaatcacacacatccttcaattattttcacctactttattaatacctatgctaacctcaaaaatacctatattttgagacggaggaagtactttactacgcgaaagcaaattactcccttcgtcaaaaaaaagacaaaccctggctgtaaatctagacatggagtttgctttttttttttttacggagggagtagtatactagtactgtatatgcaatgcatttttatgtaaaagtactccagtgctgtatgttattcatgcagccgatctgtcagcatgctatggaagtggaattagcacaagaatccagctatatctctatgggggtgtttaagatcccacacaaaattttacgccatatcacatagaacatttgaacaactgtatgaagtattaaatatatgctaaaaaaactaattacatagattatgactaatttgcgagacgaatcttttaagtctaattgctccatgatttgataatatggtgctacagtaaacatttgctaatgatagattaattaggcttaataaattcgtctcgaggtttactgattgattctgtaataagttttcttattagtgcctgaacattctatacgacaccatatataatatctgatgtgacacgtcaaaactttacgccctgaatctaaaacatccatagaagtaatacatgcaggagatttgaaagtcgggagcatattcaacggtttcacacgcatatatgatcacgcctgtgcctgtgcgacgcatattctactcgttcgattagctttcctctgcttactactgccacactgttccatttttttaagttccttaaacaaacacgcgcagaagatggagctagaaggagctggaggagtacgccatcagtccatctagtttgccagttacaaacatgccatgttacgttcctgtgcactgatcgtctcagagaaattaaagtgtgtctggattttcagtgcaattggacaacttgatgctaccacatacagttttgtttcgaaaacagatttgtatatatatactaatactactataatatagttttctcaatacaacctttttctagctcttgacatctaagcaagggtggatgcttcctcttcttttcctttttcttcctatgcaaatttctttcagaaattatatcttttctttctctagcaaaggtgatcatatcctattattatttttttaaacgacccacacacgacagtgcgaaatttcgtatttgatataacaggaaaaaaaacaagattaattacaatcctgcgatatcgtaattagaaaaccctgggagatcataagctattaagactcttttggacattatatctctctgtatagactgtatatggatgtatttgcgtacttgaaaaatatcccacatttagtttagtttgctgacacagctctccctccctccctctcttagagaagtttattttttatccggcctcaatatctggttggatgtatgcaacctttttaatttaaaaacttagcccctcaaataacctaatttaaaattcgctcctagaatgctactcaggtcactacaaccactagactacatgccttttcacacttacacaactctctactaattaaagaaagagagccttcaaaagtactatctctctcattgtttgcttgttaacttatccattccaatcaaaatttaaactttgaaacttatttggagtgttttttttattttctaggtatatacctcgatctctagctagaaattaatgaacgaaaaccaatatattgactctatcaatacatccaaccctatcaatacattgttttgcaccatcttatcagcaaaaacaagtaggcacggtgtaaatctagacaaaatttattctaggacataaatgatgaaagaaatataatcataaaaataacaatatgaaactacaaataatattggacggaagataattcaatatcatgaaaattatataactaaattcctattttttttcatttagctataatacagaaaaaaatataagttacaagaatttttaatggatcaaatagtgctaaattaatactataaatggaaaaaacaactgaaattagctagaaatggaaaacaaactattttagctcatagatgaagatccgattcagtaattctgaacgggtgcccgttttatagacataaattagaatttttatgttctatttgtattcctattggtctcaatattatgtgaatggtttagcagcatggatggactggatcaagaaggaatagtgcccagcaggcattgatcatcttctttcctagctaaaggcaataaacaaaagaagaggaaagatgggcgccagtgctccggtgaccaaactacgatgaggaatgtggtaggacatgtcccaagatgtgactcatccataaatagtggaggttggcaacgaagaaaaccagaacagtaggaacgtggccggcaacgacatggtcacgacagagagagaaatgataatggtgagctttggtggtgaacatgatcgaatgagtgtgccaaaacgcattcccggacgaagggattatgttttacttgaacacgcaggaagaacgaaagatggagaaaaaaagactaacattgttcgtcatgttccctagccgaaacaaaacgactaacactgctcatcgtcctccttagccgaaacaagaaacagaagagaatggaagatgggcgacggtactccggcgaccaaacgacgatgagcaaggtggctggacgtgtcccatgatgtgactcgtctatagatgaccgcagttagaaatgaagaaaaccagaacagcttgaacgtggctgacaacgacgtggtcccaaacagagagagaaatggctacattgggctcttgtggtgaacacggtcgggtgagtacgtcaaaacgtgttatcagacaaggagttctgttttcgacgggagaagatagcgcgtgtagagagggagagatgggagcaccgggagagaggacgacgggaggaagggaggtgaaagcggaggcgcgcaggaaggagggacggatagacggatgaaagagatgggggacgctgggagggagggaggaaggaacgaatgaaaattggtgcggaagctttgtattttttaattagctgtatagatattttgtgacggagccaaattaaaagttggcactactcaagatatttaaatacagtagctacaacatattaatcagcaatgacgctgttgtgatttcacacgctgccgccatgttcacgccaccgccatctgctatttcctcctgttactcggagagtcagggaccaaaaggacacaatgatatcgatcggcagctaacggggaaggtgagcgacctggattccttcccgatcgaggtcggcaagctcctgttgctcgacattacacaatactagatacatccagggatcgaccgatggatggatggatgcttctttgctctcgtcccctttcgcgatccggcggaacagtgcgccgtaagccggccgcggatgcatgtggtatcggcaaacagcggcgtgtaacatctctctgccttttttattttgcgatccacagctcgcaatcgaccgcgtcccgacctgttgggctccattaataggggtggcaaaggctgccgcggccctgatagatgcagtcttgggcgataagcgaagacgacgtcgacgggcgtccattaatctctttgcatggttgcgcgcgggaggatcaccgagatcgatcgatcttctccgaataagggggcctagctagagctcgacatgtcatcgcgcgcggtattagcgtcaactacgcgtgcatgtgctttgtaatgtgggggagataagatgtcccaggtgtgtggcttatctaattcagccgacgtcgtacgcactggttatgactatgagtccgtgcgatttgaagggatccgttttcaacacgactgctggccgggagccttcttgctgcgcctgtatacaccctccgtctcaaaaaaaaaaagagaaaagaaaaattcaatcatctttagaattgaaccttttttaaggatagagaagtactattcactagtataaacagtggcggagccagctcccgagtagattaggcggtcgtgcgtaaaaaatgatttacttacaaaatgatattagttgtttagatttaacggtgtcataggcttcgacacggattacaaacatcactactacagaaaagaaaaatgatggcactttaggtgtcggtttatctaaaaccggcacttatgatcccttcccgcccctcaagaaatctaaaagtaaaaaaccgacatatttgattatttgtaagtgctggtttattaaaaaaccgtcaccaataatattggtaccttattggtgcccctttttaataaactagcacgtataacagtgttatagatgcccgttttttaaaaaaaaccaacctgacctttcacgggcgctgatttttcacgggcaccgagggatgtccccccttatacttctctttatttctgtcgaaccctctccacctcacccttatcctcttacctctccacctcttccttatcctcttatatctccacatcgctccagttcctctttctctctgcagtgatgagcggcctccctttctctcatgtgcggcaatgcaataactcgatggtggtgacaagcgaagcggcacagctcgaacggatggtgccagagcaagcgggaaaaggcgcctccgtcacctcccctcagcggcgcctccccgacggctcgatgggacatcgacggaacgagtcgcggcggccttccatcctctcctgtgtggtggaggtgaccttcctttcctctcttgtgcattttttgatttggtttttgaataaactttttgataaatgtttggctctatgatgtgaacttaatgatggatatttaattttgtgatttataaacttgttgactatctgttctctgatatgaacttgtctattttttgttagattttttgatttatttttggtgggtttgaggcatcggctcgaattgagccaaggcgccttctctgttttttttttttggcaaatcatatacctcaaagtgtcggtttctaaactatcaccttcgattcctcctcatcagtgtcgcctgagaggttccagttgagaaatccgacatctaagctagaatgttcccgaacgatactaataactttatcgagtagtattatggagtagtgtgtgtattcccggtttatttggaatacatatgtgatagatgcatagggtatataacctataccagatcgatattgaaacatgcccaatatatatgcatgataacaatgtaaaagcggatcatcacaaaaaactgcataaataggttatctaactgggcacgttgacatgtaatttagcctagttaaatagtattaaaaaggagagagagagagcctagttaaacactacaatttataaatatatacggatatgtacgaattccccctaaactattttaatagtcgaagctacctcgcactctctaactgatgtgacatcctgacccaattaaaataaggtatgtgtggcctatgtgagttgtgcgtatgtttagtaccatcttgctagtccagcaagaatggaatcaacttataagacctcatccctccaactatgtcactcccgattaacccttttacacgaagcgagggcgaaagtataagtggggtggtatgtgcaagtaggcccgtccatcgaatgggctaggtacgcagcactgttttggtgattttggtccaacaagatgacagatgttggcaccaaagtagcaatttcgcccctcccctcgtcacccagcagctgctcttccatggttggtggcttggtgctgtgaagaagcatggcagagagacaacggcctcctactgctcgcaaaatgggagagaaatagatgggccttctttgttttgccacacggttgtattattttgtttgctttcctaacttatcggtctctctttttttatgcgcagacttttcaaactgttaaatgatacttttttaaaaaataatatatataaaattactttaaaatcatattaatctattttttaaaaaaactaatatttaattaatcatacactaatgagtgttgcgttttacacgtcagaaaaattactgcaagaaacgaacattagccagtctagcagaacaatttttttagggcgagtgattcctccggtttaaagattgccgtaatggtcaagggataatttggattttttttatgggtttaagatctggtcaaatgcatgcgttcctaagaggcggatgggaactctttccctccgcacgaaaacagagcggtccattatcacatgattaattaattattagctattttttaaaaaaaataaattaatatgattttttttaaaacgtaccgtttatccatttgaaaagtgtgcgcgtgaaaaacgtagaagggagttggaagctgggagatctgaacacaccctatgtgggatagtaactaaacacttaaacatttagagcaggtacaacagcaggctataagccagctataaatatattttaaagagataaaagaagagagagaagagcagcgggctacagatctggcgccagctgcatcacggacttcaagacgtaatgtatgtatgatatgtgtgaccatgtattaatagtacagtaagcaattattgtatgaattagctattacattggctatagattatttggagctagtagttggctatattattaaacttgctcttagtggaagaaagaaagaaagtttgtttcgttttccgcgcgtatgttttcccgaactactaaacggtgtgttttttttacaaaaaatttctatagaaaagttactttaaaaaatcatatgaatctatttttaaaatttaaaataggtaatactaaattaatcatatgctaataatccacctcgttaacagtatcttctcaatcttccaatcttctcttctctcaaacagagccactcctgagtgtcggcatgagtcaccatggattcccacaacgaaacccacgacagctgcagccctgtcatttagttggggcaagatacccagatgataatcacacctccgaccgtgacttatgctagatctgcttagcttttttgatgcgtatattcatctgtatgctctagcctttcacgatatcaaatctgggctcaaaaattgatgcgtcgatcatgacgtctcattgaagctggcatattttggaaggtttcgtgtgctacaccgttatattaccctgttccataaatatttgtcgatttaaacatatatacacaatccacaaaagatatgagcttctcgtaggtgtcttgtttggactggacgtataattaaattactatatttgatatatatagattcatctaataaagtaatatatcttcataataatattactcaattgatgtttacatattaactagaaaaattgtactgtacttaagaaagtacttgggtaccaatattttacactaaaaaattagtatctcgagatatcaagtattttaaagtaattaattttaccctaaaattatggtatctctcattaactttttaaggatggtaaaattatcttattaattaatataagactattttttaatgtactaagtgaaatacatattttttttttgaaactagaaaaatatccgtgcgttgcaatcggtgaagtctattttaatcttattattgttatatgctttagttcagatgaaattcactatgtgagttcggttggatatatatatttttagaaaatcatgaactgtagttaggattacgatcgttttatgttagcatgcgaatttttttaaacagatttcttacatgattccttatgtattaccaaaagtgaacgatcttaaaaatcaactcaaatatggtatgtatttccaaaagcaaacgaacttaaaaaccgactcatacatagatgacgtaccaaaataccggcaaaaacatcttcattttttataatagtagagaagagatatagattagaacaaaaatataaaattaaaactgagtcaaacacggatgacgaaccgcggaaccatcttcaatttttataaccgactcaaacacagatgacggaccgcggaaacatctccaatttttataatagtagagatatatttctaaaagcaaacgaacttaaaaaccgactcacacacggatgacgtatcaaaataccggcaaaaatatcttcattttttataatagtagagaagagatagagaagagatatagattaaaaccgaaacataaaattaaaaccgacttaaacacagatgatgaaccacagaaacattttcaatttttataaccgacttaaacacaaacgacggaccgcggaaacatcttcaatttttataacagtagagatacaatataaacataggtgctcataacgtgcacacttacctctataaacgcacatatgcactcacctatatgagcatcttttgaatattggaccgataatctttacattattgttgaagtcaccaccggtacattgctatcgacaggcagtacaacgcctacaattgaagaaaaaaccataaatatgagtgcatcaagtgaatccagatgggttgattctattacaagaaacttaaccagatatttgtgaggaagggatcagagtgtatatacgttacatgtgtcagatcaaacgtgacggaggaataagcgatgctgcttatgccgacttggttgcagcgctcaatgtcggctgggctttctcatcgatgtcttgcctgagaaccatatccataagtttacaaagatattacgatgcgcatcaacgtactattcaatccatgaccgacggtaatagtgctttgtgacaatatggctgagtagaaacgacatgggttttaacaaatcaccatcattttcttatatgcaggtcattttcagggtaacttattggctccggttttgggcacaactacaaagatgtgatgaagatgaagagttgctgaaagttgcatgccaaaagttggagactacggttatctaattttttaccaattatggttggagatttacaaatagacttcaataattgtgatctccttacgttagatggtttctttgtttttctcttcagtgtgttctattaatttagatttacactatgttcataaaaactactatgtaataattggctgtaactcttttgagtaaataccgggatattatatttcattattaaaaaaaatagtgctttgtagcggaaaaaaatcgagaacatgccttgccccggctcccgcccgctcaactcatgctcatgcggcttcgcgagttggtgaagggtcatccgctcttggttttattaattctgtcacctgtgcctgtgcttgatgttatgggccctgaggttgggccagcgatatctatcgttaagggcgacaatctccctctctcccctcccctaatcacacatcgaatacttattgatgcgaaaaatacatactggcctgggagatctgcttagctccaatgcaggtccaaagattgatgagatgcgagcgtgcgagtcaatttgactctgcatctgacaagatatacaaatagcagatcgatgagcggatcgactgtcaagccgatggagtaattccagccgatgccgataccagctgatagcaatagggttttgagctatcggctataattctgatgcttgatgtaaataacaatataaaagcaatcggctgatgataatgcaagaaagcaataatataatcaagtagaaacgaatcggctaacaatgatatgatagataagcatcgttgcgagggttaaagtatacatcggctggaggtccgatgtcattaaatccacaagattatataaatagtaaaatcattgttgcgatcggctaaatccaatatgtatgcaattcttgtaagccgatgcaacgtccggataactcatcggctgaaaccccggtgaaacccttattggctggcaaaaagcaggctagggattatggttctaaacatgacttagtagatcaaacttaactgatgcaacactaagtacgaaaagaaacacaatatctagacaatcaagccgtttactgattttcagggtggtggatgtctaagctaatctaatctagcaacacgatttagctgatactggcagaaaccctaaagcgagaagtggccgatagagctaaatcgatatgctgagattagattaacatagacatatgataaataggtaggcaaatatatcaaccaaaccagagcaatccaagaggtcgaatgtactgatgtagctttgaacaacgctgatgaagccaatataattgccagggccgacggaacgtaggacttactccttcgccggagattgaactgaaccgatgcatccccgcgtcaggtgccaaattctgtcggttaataagtaaaaggcaaaatttgctacaagacacccaaaaaaacacgtaattagctgaggggcaccgagaaaatgtggaactgctccagaacactaccaaatttgtgaaatcgaccagttatgatccgtctgcaaccaaaagagtgtaattagctgagggacactgagaaaacgtggaactgctataggacactcttttggttgcagacggatcataactggtcgagtatgcaaaaatcgatctctattttcgcatacggctccttaaaaggactgcatgcaaaaaaatagatttacataggtaaggctctcaagagtttgcacgtaaaaaataagcctatttttgaaagcggacctcttaagggaccgcacgagaaaatatatttttgcaggcgggcctcctaaggatccacctaaattctaagttacctccttatttttctctaacatttcaaaatttttcatccttatccactcatctctctctctcaccttctatcctcattattttctctccactctctcaccacctctccttctcactttcctttctctctcaccttctacggatgaacggccagatccgccgctgttaggcccccgatgataggattcgcaggctgcaggtggcgagaggcaggcagcaggaagcgggcagcagcaaccacggagcacaatggcggcgggcggacgagtcccacccgaatccggcggctcgtccattaccatgtgattttcataaggaatcgcataaaaaatagatttctcacgggagtccattaccatgagcttggtctcaaccatcttcagttcttcacgagcagctcgaaatttgagctccatgtgaaaatgaaagcccaaccagtgaaagttattttcttaagtagtgagaggcaacctctaaacaaactatatgagagaggatagaaaaatgcatgagcaatatattgggagcaaacagatcaaacaaaagttttacaatgtattgaagctagtgtactagaggtaatatacactacaagaaaatgctttgtagagacattttctgatactatagagacacttttcaaatgccttcacgatacttagaggcattttaaaagattgtctctataaacggagatgcattttataaagtgtttataagatggtagatgtattttctacagaacattaaattgtaccacaaccatataaaaccaatgcaaaggaagagaataaaatattttcgcttgctattgctaatccttgaactcaagatctcttagtccaatcatttttatctttgactaactaactcaacccctcatatcattaatgggatgtttgtgccttgagttagttatgtttacttctttagtatacattatcattataagaagtgtctctacagagtttaaaatgtcttaaggaaatacctttacacatcatgcacattttaaaatgcagaaaaaaatacctctacaacataaaatttaacaaaatgcgctaaaaatgtctctaaagtatctctagagtaaaagttttccaagcaacaaaactcttgatcttagaggcaatttgcaaaacgcctctacaaaagtgtcactatatagataggtttttgttgtagaaatattgtgtatattaacttctaattaatgagtggatggcatgtacaatattaaagcagcaagtaatacagtgttatatgatttgaagtgctacctctaaaaataccacttatgaataaatgatgaagtcgaggacagaagtgataagagagaagagaagcaaccccttatgaatcttctacatgagttctaagagaaatagaacaaaagatgacactccctctattccaaaatataaggaattttggttgaatgagacacattctggtgctatgaatctgaacaaaagattcatactactaggatatgtcctatccaaccaaaatcccatatattttggaatggagggagaacttgattgggagaaaatcaatacattaaaattgatatgtgtaacatgcatttctataatgtagagataatgatttgacattgcttgcatattgagttctaaaaaatataaaaataattacaaatgttatattttgtgatgtgaccatgcctaccagtgatacaaccattgctcacatcatagatcaacaagaagtcatgaaggtcaagtcctccaagtgctagaatctgattcggccacctgctatactgctgacttcgaagggccgccaaagttgctttttgtgtgtgtgaggaagaagaaaggaatatagcatatctgtttggattcggtggggtggaaggaaaggaaaaaaaggaaagaaaagaaaaggaaaaaaaattgtagattggattcggtttccataagtgaggaaggaggaaggaggaaggggaaagtctttttttttattggattcggtttccacttgtggggagccaggccgaacccatccactctctcgactccctcccaatctgccgactccctcccattgtacctccaagtctccaactacccaccggttgtgccgagttgctagacacctttggtgaatttttgtttggtgtcggtttcgagatccgtttggaaaaacagaacccgtataaattcagcattccatttttgtataatttgtaattttggtttggacttttatagttgagtcctgtaattttcatatttacatttgagtccctatgaccttacattgagatccttgagtcagtttttgttaaaaaaagaagaaaaaaaaggcacaaatgtgctaaaaaaagagagaagaaaagccgcaccgaaaaaaagagaaataaaaaaaagaaagaaagaaagaaggaaaagagaaaaatcagttgtattttttagtttgctttcatatatcatagtgtgcttgagttgtttctagtgctatcttgtggtatcgtttatatttagacttgcgtctctagtacgttctagcctaggaccagcacagtcattcaactttgaacgattattcaactttgtattctctgatttgagcatttgctattcctttgctacatatttaagcctacccagagctccacagatttgattgcagccgtacaacaagtatttgccaatgcatcgatacatcaaacctccattggggtgcttggttgagtcggtgtatgtcaccattccgcttgcattggtaaaattttgtaagagcttggttaaaggcttgagtgtgagtgatatttgagcctccactacctagtagttgataggagcgtacatatattttgtgtatgtttcttgttttctactaacaatggcagggatacgcaagaccgttgaagatgaccttgctcgatattgacatgaactactttgtcgagacatgaggtgtgatcaacatgatgctaatgaggtacgtgatgatgttctaactgaaatcaaatctgcactaccttattttgaaggaaattatgatcctcatgcgtacattaattggaagctagcggttgatagaatttaaaaaacatggtttatctgagaaacaaaagattatgtgtgcctctagtgttttaattaatcaagcttctaataattggaaacatctttgtagacataataaaataccacaatcttggaaagacctgaaacgatatttgagagatgtttatgtcccaatgtattatgctgatattctattcaacaaactgcaatgtttaaaacaagataacataactgttacttcatactatcatgatatgcatgcttgtttattacgttgtggtttagatgagtgtgaagaagctatagaataaagaaattcaaaaattcaggacatgcttgcttgtcaaagttataactgttttgctgatttgttacaacttgcttgcaatgcgaaaaaacaaattgaggatgtgaataagcaacaagttgtgcatgtgcctcctgtaactaatattttgcagaaagtgaacaactacagcaaggaggggagaaacatgacggagccatctttctcatcgcttcaaatgaagtctaatgcacctccatcatctgaagagagcatcaaaggtaaattaaatgatgttgagattaataaaggtgaatgtgccgttaatgaatgaaattgtccatttttcatgctatcatagagcaaccattagtgaagattcctttgtcacaagttgatttaattgttgttccttgtgataaagaagagtgatgtgataatgcttcacttatatccatgccacaactagtgaatgaacatgctattcctactgttaattcttactgcactgattttaagcatgttgttcacattgctaatgaagtagaggagcgtgaattgctatcttctttaaatactttggctattttcaatttgatgatttttgtgagctcgataatttgaaggagaaattattttctaagtctgatttgccatgtccaactaatgctatttttcatatctttggcggctataatgatataggaatatatttggtgcatagagtttatatctgttcggatttagaacatcatgtagatgtggataaagctttcaagctagagatacatgttattgctaatcatattacttcgagtttctctagttttgattggatgaaacaggttgttctaaatggactacgcaaaaagcaccatatggaaaaaccgaggacggttttccgtgaagaaggggaggatgatgtgactatgcctaccagtgatacaaccattacttacatcatggatcaacaagaagtcatcaaggtcaagtcctccaagtgctggaatctgattcggccacctgctgcactgctgactttgatgggctgccaaagctacatacgacctctgtttttggcccgtgagtacttgacggaaagctctcagagtcatctttccaatggaaccagccacatctccgaattccagttcgtttggccgcaatcgtagaaacaaggtgttacgtcacctatattgggccaatggacttataacttcgtttgggaccccggcccatgtggggcccatgtggggtgtgccccaaccaggtggagcacgaccctagggacccctaggtcatcctcccacctccataaatagttaggtacccctttagggtttcttggggttttgttagattaaagtttagccattaatacttgcttgcagcgcacgtgttggctagaccgtccgtctgcttgttcttcggaaccccaacttatcatttgtattcattcctatttacaatatcagattgcttttatcttattctcgcttgtttcttcaatttgcttgcatgaatagggttgatctgcactggcaagattaacaacccacggagaggtgtatcaatcgctaatgcgcaacacaacgtctcgtacggttatagtcggattgtcaatgtttctcccaaatcgtagttatctgaactcaccgaaagaggccaacaactgccttgagtattgagaggaactcagggttcatcattttgtttgcatgatatataaaatactctagataataatattgctagtaggtgatgatgtggtatacttgcatgtgatttaaaataatctagataataattgttagtagttgcttgcatgttaaactttaaaagttagtgagtgtcaactttatagtatgataggattaaatttgctcccatatgtaacaatcacctctactaaacttgctcttgcatgcctttttaacttagagataacatcttttgcttgttgacttatggcttgttaaagattattggtgttgttatccagttatgagcgaggcggtgacaagttgagctttacatttttacaggcggaccggactagtcaacatccgcctgcgaaaattatcttcgcaggcggacggccgccccgcctgcgaagactctttttgaccacttgcgataatgctttttctatagtgggataacgagtgcgacgtgctcccacattcaggaaccagggattgcaaaagtaaactttggggtggttcgatccatttcaaacccagttgctagctaccaaagctgcaacttgaaatgcatcgctagtgataattgggtttggtggataaaaagcaagtgatcgatgtgctctcagcctcctatgattcaccatatcctctccatgactccatcttatcgattagcatctgaattcggaatagtcgagtaacttaattaacgctctgtaaatacattacagtacggagtagtacatagctgttctccgtgtaccggccgtgcgcaaaaaagaaaagtatcctatgcaagtacagttcttctttactacggaaaagtaattttatccctcgagagaatatcctcttgtttcgtacatgtcatctaaatcattataattttttttaaaaaaaattaacaagatagattaatatgaaatatatcacttcacaaatatgtaaaggcaaattcaatttctacgagttgtaacgaaaataaccgatataattgtaaatgtacgataactattttcaggttaatttgttctttttgttgcaacttatataaatcgaatttggccttacatgtttatatagtaatatgtttcatattaatatattttgtcaaaaaaagttatcactatttagatgatatgcaagtaagcaaaggaacatcccctctagggattaaaatccacatccctttactgcacagatgcgtttctgcacgatggagcagttcgccttgcagagtcgttgcacgcagacatgcactgcagcatatccagcacgcggacatatcgatgcatcaacccattgttcttcatgtggccggccagtgtgctttgtctaggatcgtgcagaaatgtctgccttttttggttggacgtgcagttgcgctgtgtgcctcttgactctgatcggcagggctgcacaattgcacatgatatattgacatatatgcatgctgtggacaacttaattgatcgattaatcaataggcctgaacgaactaagattattttctaggtatgacaagacacgtagggcatctgctctttcagtacttccaaaatcagtttaaaacatgtggttccacgaccgtgcctgtaaaaatcaccttttacaggaggctctctaaaagatacgatagttgttgaaaggctccactctttgatctagcctcctattaatggatccagtctctccatggtagatccggcctccgcattttggcattttgttgatcgatctcgaggaatccaacctggattcaacaaccacttgttgatggatctagtctccttgttgatagatccggtcattctgttcatgttgtttttctgagacggtcctttgcaatattaatccgtttgtaaaaatcagttttcacataaggatttaaattatctatcctcatatttattagaagcgggttttctcaaagcccctcgttttaattgtgtctctaggacagatattatatgtactaagttgagctcagacttcgaatatattttttgaattaccacgtacaggtttctcgcagcttttccaacaccatgattgtacggaactcataaggggccaaccaattaaccacgcatcagttgcacgcagctgggtccatatactgctaactccttttcgtttagcccacgtgccccggaacatctttcgtgacaggaaacatctttcgtcatttgtccgctctgcgaacaaaacatgggcctcagcttcgatcttttgccttttggccactggtatagtgtagtgcaaggtagagtgtacacgctatagtagcgctagagcatcgatcgatctcatctctagctagctatagccattattaacacgatcgatgcatgatttatatctggaatataatcaacgcatatatgtaatatgtgtgcacgtgacacatatatgataggccgcccggggatgcgagatcgttctcggtcatgcgtgtgtgttcccttggcatttctttgggagttcatataattgaaagctacctccttagtttcatattataagactttttaacattgctcacattcatatagatgttaataaatttagacacaaattcattagtatctatataaatgtaagtaatgataaaaagttttataatatgaaaccgaggggtagctccgtagtggccggagctggcctcagttcaaatcaccggccggttggtccgttggtccatgattcggttccgatctttctgtatgaactgaaattaattcgtcctgcgccggaaagaatatgtagtatatatcttccgatgaaacgatgatgagatcgaacatatataacacatgcaatgatgcaatggggtcggagtactggtcgtgcttcttatccgtgaagcactctgcatatgctagctagctagctagctgcctagcttcatcatcggtgccaaggcataaagtcgatgtcgatcacctcctacgagacgacgaagaacaattgcgtgagacccgcccccccccccccccccacattggagccacttgcactgatcacactacactaaacgacgaggttacttaaccacgtggtgttccagacgtagtagtagttttagggactgctcggtgagtttaaaattttaagaaacaactggttggtagccagctttttaagaatctggaaaaactgggtttcctatcttctggcttcttgtttttattctgcattctacaactacaacttctcagaatctagaccaaaagctggactatttaggagagcttctaattctgggagaagttgcagcagctaaaagcttttccaaataggctcctagctagtttgtgtggcgaagccaataacgagccgttgaacctgaacgatcattagtgttttctagcaagctaggactattggtggagtctaatgaccgtcttactaacccagcagctacctttacataggaataaggttgtgttcattgctcttggttcccagcccctctccctcatattccgcatgcatgcttttcaaactgttaaacagtatgtttttttgtaaaaagtttatataggaaagttacttaaaaaaatcatattgatccattttttttgaaaaaaatagcgaatacttaattaatcacgcgctaatggactactccgttttccgtgtggagggaatcagttcccaaacgagagaaacaaacgcagcccaagtctattttgtctctctcatctcttgcttctgattaaattatctctctcaattgtaaattcaagtataatgttttcctcatctttaaaaatcggtgtaaatcaacttcttcggtggtttgagaagtggtttatgccgaaacggtaggttgagactagctgagtcgacaaatctcttaagcaaaaaaaaaaactaaatttttgtagtgggacccatgtgtcatcccctctatctcctcccctcttctctctccctcctttcggccatggtggctgcggagggagcgtgctcggcatgaggtcccctagaatgtaggaactgggaacgtagaggcatcccacctccattcctatgtcgcatccatcagccttcaacctcgcaatgttcgtcgcgcttctgctgtcatcgccgaccgctccccgttcaaccttattatcatgccccaccactccgcgcttctcctccctaacgaccacctccatcttcgagctcttccattgtcatccccagcaagcgtctcccagctcgtgctgtcggtggcctctatgccgtggggagctccgcctcctctagctccttctccctaagcgctaccatctcctcggaccactgccttcactgatcgtgccactgcttctccacaccgagaacaaacatcctccttcgctagcaccaagaacaagagagagtgagctcgcatgagagagatacaagagagggggaggtgcaacaaggaaggaaggagggcggcactaccactaattcactcatcacctagattggctcaaggcaacgcggcacgatcggctaagttggacgtaaagctcggcattgatgcgaccttgttgagcaccccgtctccaaggacatggatagagctagagcgccactgtcgcggcctccctaagctcccactgcagctgccaaggtctatcgacgcttctatccaacgagctccacctcggcctctatcctagcgagctatggtagccatgttgccattgagcatggtgcgcctggagaagataggaagaggcggaggagatggcacattgtcgcaataagactcaccaaggacgatggtggatgggcgtgcgagcttggatgggtttgtcggccggccacccacaccctgcctgtcttagttggggaaaataaaaataaataaatagaggagagaagaagagtaggagctaacatgtggatcctatagtttttctattttttctatcacttatatgtggttccatgttttcacgttagtgagttttgaccatagtcaacctaccatgtgagcagaaactgcttttcaaaccactaaataagttggtttacatcggtttttgaagttgaaggatgtaatttacctggttttaaggctgagggatgtgattcgatcgagagcaaaagtagatggagctaaaataaactttttccttgttgcgtatgtaatgtgtacatgatcaatgtgcaggcctccatcttcagactaactgagtgacagcttcagactaactgatcgatatgatccgtcgaatcgaggggatgctttagtgtgatatcgagttcgttagcgttctgctccctgcgggcgtcacacgttccgtctttgggctcccaacctgtaacgtgagaacaacatccagactgcatttaaaattaggaataagttcactttaggtcccttgatttgacgtcgaatctaaaattcatccataaatcgtaataccagatataacacatcttcaactttcaaaaccagtacaaataagatcccaagacagtttcgatagtggtttcggatgacgtagcgtctacgtagcattgatgtggcacttaaaagcggaaaaatcatagggcccacatgtaagtgacagtttagttaaaaataaaaaatttacaagtgggacccacatctactcctcctcctcacccaaactccccgtctcctcctcctccccctaatccagcgacctggcggcgtctccttgctgtggcggcaatagatccctaaacctttccgccgccgcgccgactcgccgaagagtgaggagcccatccctccgacgatggtgggggcgaaggaatccggtgcatcccgcgagatctagacggttgatggctaccggcggtattgacctcaacgctcacggctctacggtcacccgacatctcgcggtggctggcagaagggcggcaccccgtggagagaggggcggcctgcggcccttgccccttcgatcggccggcctcggagaacgggaggaagacgatacatgctgggtaggaggtggcgacggtggtatgtaatgcgagaaggagtcagaagagggggacaggacgtacctgagctcttcgtggaggccgacgagcccaacaccaagccccccggagatgatggcttcgatgagcccaaggaccccccccccctccccccgagaagatgggcagcgtcgtgctccgtgagctccgcctgagcccaaacgacgacagcaaccgccgggaaccgctcgctcgtcacgccggtgccagcaatggtgtcgatgatgttgctgctgctacggggcacatcgggatggctcgacccgacctccgaccagacaggctccttccgtgttggtggtttccagctgagttcgcctatgaagcaatccatggagaaggatctccggatttctcctgcttggtgtcggtcttcgggaatctaaacgagctgcttccgtcgcacatcgtgctagaggtgctcaagaggaagtatggccctgagggcggcatctggagcatccgcgtcatgctctacaccttcctcgctagcgtgccgccgttctgggccgagttggagaacaccatcttcaccgccatccttcacaggccgccgccgtccgctggagatgtaaagagggtggggggctgagaatgacatgtggagcccacgtgggccctaccattttttattaatttgtatgaaattgacgtgtgggtcccacgaggtttgttatttttccgggtcaaattgccacgtaaatgctatgtcatatgaataccaagtcaaattagccacgtaggcgccacgtcagccaaaactgccgagggacctcatctgcattggttttgatagttaaggagccgttgtatctggtttactggttgaaggatgaaaatcagattcattgacaagttaaggggcctcagatgaacttattccttaaaattattgtctgggctggatcattcatacttgcgaagttgggctgtcctaatggcctagttttaggccagtccgggcgtccggcccatgtaatttggttcgggccatgttcgttaacagtgaagactttcttttagggagcaaacaatgtaattgtgggtttgtcatgttgagctgattttgattctcaaggcggaaaaggaaaatctacagcggatgcgttttgcaacaatatgcactgttgctcccatggtacatactctgtgccctgagatccacgccatgatgtgccatgacgcccctgtgctaagccagagttaaaagagcctgttcactttaatactattttcaaccttacaaaattttgtaaagttgtaaaaaaagtggctacatttaatttgctgccaattttttagtaactatataagaaatcctgctaaaattttagcaagttgtcaaaattttggtaactatgctaaggttttttttggcattaaaataaacaggcccaaaacctgtaaaataaggttaatagtactattacttcggaagttcggagtatgtgcttccctccctcaagggaaagaaaggtatcgttacgtttttttgcgtgaaaggaaagcaccacaacactttccacgttggagctcaccaccacgcacacgcacacgcacacgcgaggcgagagcgcgatcgaaaacgaaacatggctacgtgcacacagaatcgatcgatcggcaactcggcacggcatgttccgctgctgctaagcccctctgctccaccaaaagtcaaaggcacgcacaccgtacaccggtacacgtacgtgggccgccgtagccgcgctggccctcccctcttttgtttaatccgccgcggcgcgtcatcgacggacggaaacatgggcacgcatgcaggatgagcgcgacgcgcgagtctcaagtcttccagcccagcaacggcaccggcttcagccttcaggcgatccctcgcgtacgtgttgaccgactcgcatttcccaccgagacattcgccgcctcccgtgatttttttttaaataatacgattttaatgaaaaatcataaaaaaatagatcaattagatgaaatcgcaagtttagcaccctgtcgaacaaccgtggtttgacaggatacttatcgaacaaccgcagctcgataggtgataaaaaattttttagaaaaagagaataatcactgcagcggcactgtagtgcattgttattgcgaacatatcgaacattggcagtttgatatgcccccgccgatcactgtagcagcactgtttatgtactttttaatttttttttgaaccaattgcctatgtttgttcgacagggtgctaaatttacgatttcgtgtaaccgacatatatttttacgattttccattaaaatcgtattatttccttaaaaaaaaaatcgcctcccgttgctgtaatggagcttcgctttcagccgtgcaagccgggcagcagttggggaagttacttccgagcagtgtggcgtctgcaaatctgggccgtgcgatgtgttccgaggcagatcggagccgtcggatcccggaattaaggaaccgggccccgtcctttccggtggttgcacgcgtgctcgtccgtcccccgactctattcatttcgcccacttggacgccgcatcacccatcccgaaggttacatcgaccaaaccaaaccccccctcccttctcctcgcgtcgacgcgtccatcctccagaaagagagagagagagctgcccgaggaggaggggggcaaccgtagcgaggcgttgctcgtgcggatccagagggggggcgcagatccggacgggccggggaatggcgtcgtcaccggaggcggcggcggtgggggaggaggagaaggggaaggggaagaaggaggaggggcggcggggcggcggggtgctggggaggatgtggcgcgcgctgttcggcgggcgcgaggactacgagaagcggctgcagtacctgtccaaggaggaggccgccgtgcacgcgcggatgcgccgccggacgcagttctcccgcaccgccgtccgcaacctcatcgtcctctccgtcctcgccgaggtccgcatatcgaaatccccccctcttctatattactctattcgtttccctaacgaaaccttccgccgttagcatgattcggttcggatgattggtggtgtggcgcggactctcttttgcgggagtatattgtgattgattgttgtgtgtgcctatgcctggattggtggcgattcgttgcggaggtttttgcgttacctgtgcctgtttcgctgatcaaacttttggagtttcttttgtaagcattttcgtggcttgttgctgtgaggagcgatgcttgagaccgagtccgtggggatgaggacaagtgaaaacagtgtcaatgttttgtgctgaaggggcaaaagggcgacagctttattgaaacgaagtaaacatagcttgggatgttctcgcaaacaacaagtattgaagataagctattcatgttgttgagcatatcttttttttgtgtgtgtgagacagttaactgctttggtggtatatggcaatttcaccaaagtagactgcaggggagtcatcccatggtagtgggaaatggagggtttgctctgattttccagtgcttagatatatgagttgagaattctcacttctccctctcagtagatgttgaaaggttgtctacttttattcagtcagatcatcatgttcaggaagctagttctattcatgagttcattttgtaacaattaattactcatgaatgtatgccacctgtgatggtcttttatgtttatagacgtgttccatgcacttctataaaaggttatgtcctgtgatacctattcaaagtacaagtatgtacatgcttacgtatttcgatggacaatcagaatcagttgtttacaggagcattacaaaattgtttgtctctctcctcttgatgtagttgatgtttgtagggttgctcaactgatttgtttgttatgaaactggctgaaaatggacgcagttgctttttctgtcaagctgcagtgagaatctgcctcctctggtatcttcatggcattgagatttgcccctttttcactgtgttcctctaactatgtgaataagtcatggcaagttttttaatgattatataaagtatcagcaattacatgtttatgctgtgaaaaaggaggtcatggaacatgagtgatccattctggaaacgtggacaatccactgctaaaaataaatactatgcatgtctcttgtttattccattgcagtgttcatttccccttttggttgatgtgctatctatgatgtggtttacattttttttaatcttgcagcaataaagttttttctttttgcatccatatgcccaaagggcaatatctacttgtttgatatcttggtcctgttctcaggtggtggctattgtctatgccattatgacaacaagaaatgagcatataacatgggaaatgagggcaatccgagtgctgccgatgtttgtcttgcctgctgtatcttctgtgatatattcaacagttgtaaaattcacaaggatgcgtaagtaactcaatgctgttttggaacgtaccattactgttcatattgactaatatgcatattcaaactatttccgtgagattttactgtttttactctttagtgagtcctgcatctctgcttaagttatatatagaatagacaatatcactttagtaaacttctatataagctctgtgttggtttacattctgacaatcaagtgaattagctgtatgttcttgttagagagaatatcaccctggtccccagatgctggggtcaatttcattgtctagtactacctctgtttcaggttacacgactgtctagcattgcccacatttatatagatgttaatgaatctagacacacatatatgtctagattcattaacatatatatgaatgtgggcaatgctagaaagtcttataatatgaaacggaggaagtacatgacttattttgaagcatataagctcccaacctgcattttttttttcaattcagataggtactcggtctctcataaagctatgcctattattgataatgtatgtaatgcaccgacatacatagatttctgctgatcttctttatgcagagcatctagttaggccattgtaataccagtctccacactttgcttctgtgcaacattatcagagctgttaggttccttctgttttcacttgcctatgctaaaacttacatgtctgcaatatagaaccatgattgtgtctggactactagattggtgcacttataatatgaagcttacttttcggtgctgctttatttgagctttttcccccctctcttttgatctacagtcttcagtttattgtagattgtagttaaaatctgaattgattttctttggggtttttgcttagtgcaagtaagtttgagaaaggaggctgtcccctggttcccattctttttccaaattggcaataggagttgtgccatacaaccagcttcatgagcattttatctgaagacagtcttaagaggagaagatggaaatgataatatttattgtgttttcttatcaagctaaccgaagtcttgaatctcttctttatcttttgtttttgttgttgaatgggcatataatttagcaagctatttgcaatattcctatcacttgacatagctactacaacttagtgtcaaactaatatcaatgtttgcatgtctatttgacacatgaaggattagagatttgcacacctcttcccagttctcaattattactctttacaatttacaagcagatgctacccttttactgggaaagatatttactattttatatgtcaatttacatgatatagcatttaatctgtatgatgtgttagtatactctattcacttcctatttgtatctgttcacagttgagcggaaagaccagaagacacttgaaaagctgagagctgagaggaaggccaagattgatgagctaaaagagagaactaattattacctcacccaacagcttattcaggtgagtggccattactcgatctatagaagttcagaacttggaataaaattttatcatgttatatgcccaattaatagtaaattcaccaagacctgcaaatgtgcagaaatatgacctagatccagctgcaaaggctgcggcagcatcggtattggcatctaagctcggagaggaaactggcttaaaagtacatgttggtgaagaaccaaaactggattcagcagttgctaggagcaatgatgtggagatatcaccatcagaagggctgagaaacaggaagcaatccaatgcaagaggtagccgaactggaggcaccactgctgctcaaaatccagctcagggagctgaatccagtctgacaagtagctctggcctggaacagcctccaatggtggtagaacattttcaaggctcaggggcaagtgatggtggatggatagcaaaaatcgctgctttacttgttggggaggatccgtcgcagtcgtacgctttgatatgtggaaactgtcatatgcataatggtgtgtacgacaaacagaactatttgatctcttttgcctgttgtgttaaaaaagactgatgcattacttgatatatcaacgtgcaggcttggccaggaaagaagattacccgcacattacctactactgcccccattgtcatgcgctgaacacatcaaagcaatctttggggcaacattctggctccaattcaggacggtcgacaccagttgctcctgctgatggaatatctgctagcagttcagtagtagagagtgaagtgagtaacatgactacaattcaggagctgaaaaatgaagaaaataccgagaagcaagaagtgcaagcaagttgatcggtcataaacttatactgctggtctgtgtgaaaattagcacatctatttggtgtatattgccgtattcaactggtttgaaccacagatgttgcactgctgtaaattggtaatagtgcctgatatgatccacctacagaggccgagtacaaaattttgagtcaccatctttacatccttggatgtatgaattttgttgtcaatagggtgggggacaaacgactacctgatgtctgacaatgtgagatttaaaagctagcggatggagccaagcagttcagttgggcatgaagcatggtgttggtctaaaacttagacacaatcaatcccccatatctgtttacccgtgctttatttgcagttgcaccttcggagatgaggaattttgagttctgttagtttctgaaccttgacgattaccatttccctgagatgtctgtaacttgcagcatttcgtctgcaactattggtttcttttgagtagtgaaaagtgacaaccacaccatttttcttctgaggtttgtaaccgtatattcatctcgctcgtcttgttgtggggttttttgttcttctaagttttcgacattcgtttcacagtaatccaatctaacacacgactacattactagtgtagtttcctcagtctcacactatgactgcttgctcggtacttacttccaggcacaccgcacatacgatacgatacgatacacatctattcgaagaaaacaaaagcacatcatttgcattgtagtccatttattttctaaaatataataacctagactattaaatctagatagctaatttggtcccagttgctatattttaaaacgaatgtcgtattagatgttatattctggaacagatgtactccctccgtccaaaaagaatcaacctcccctcctaggttgatgtatgtgaacatagaggttattcacatatattgtcctaggaggaatgacatcggttgattctttctgagacggagggagtacgttgaaacgaactaacgaaggtatagtagtactagatattcaaaggcattgacgcgccggtcaatgccacggtccagtcggtgcttcgatcgcgtcggccttgtacagatgttccatgtccctggtcccagcctccggcgaggcgactattattcttccgtgcttttgggttcgctcgtacgaccccggggaaacctctcacggagggcagtttgaacggaacaaacccaagtgatccaaccgaacccaacccaaacgccgcgtccctttgatcatcacacgcaccaacaagtctgacctgctcaaaatctcaaacccatcatctgaaactgaagtcatcgcggacagattctaccaaaacggggcacacgtccctttaatcccttccctgcccacaaaacagcgccagcacgacgcgcaacgggcggcggcggcagcagcagcagcaaccgctctcttgagtctcagataagaacaggaatcatcgcggcttctcgccgtgtccgtgttggagagggagtttgatttgcaatcctgtagtatatacacgcacccaaccgtagtcctaatcctctctcggctttcccccgggtagattaacccaaggctcgcggttgggttttggtgagtgggggcgaaagaatccgaacgacggagaaggtaagcttccgccaacgcgtgccctctcttcctctctcgcctagctctactaaacgctgatgattaatttgattatgagttagtttatgaccgccctaatcaaatcagtagtagtgatcatagcacgtgactataagatgcatgctgctccggttgagcatttggggaagccgttgcgtaaacttcgctgggatagccgtttttcttgcccccccattttacctgattatatcgcgaaagcttttcaaggaaacaaagggggggaggaaaaccccattcgaggaatccttcttttccctcgcttgttgggaagattagtttcttctgggttatggttcgtgtggcaacgaagtcctcgcccatttatgattggggtaggggaattcagggcaagaatctgatttgattcgtgttaaaactggtaatggggcgaaattgagaaatgctgtagggaatctatggccgctttgcttgtaatgtagtgctagtttgtttgctcttgacttgacctgtaagcacctgagtatgagcgatcttctctgatcagattctgttttttagtttaattcgtaaattcataatcaaggcatgttcgtcctatgctttccaatcttcttcaggtttctttattccatccttcatgcttttgttttctaagatcactacactcgtttcctgctggtgtctgtggactgtgggaatcgtatgttttctttaaatagatttgttgtgggtaaggattcagttgaattaagtgctaatgtaggatattaaagataaatgtgatgaactgagttcaacataggatcattcttatcaaagggaaagctctcaacatactacattttactcactctgtcccgaaatataagggattatgctcatgtaactacatagataaaatctctcatattttaggatggaggaagtattttttttgattgtatcttatctcttccgcgttaattcctcaaagctgttatatttcccaggccccacccttttattgacattgctgaacacgccttgttttctttatgttatggtaatatttgttgattgctaatgctattacgaaatgatttgataatcccatttcaaacatgattctccccctgtttctttttccactgaaatgtttgtttctaggcggatttgctctttttaatccatcctcagtcttcagttattgatataaactagcggttgttacagtaaagaatcggtccttctcatgaggccacacaaatctgcgtttacactgaccattgaacttctgtcaacgacttagtttttttttatagaattttcgaacttttttgtttcaattttaaaactaaaccctcaacaaacttacttttaaaagcacacgttttgactatgctatcaaggatgatgtggcaagcaaatgttgccatgcagtttacatatatgccacggtttatgttgtggcagtaccgcagtaacccgctatgtatcatgccaatttttttaatccacatgacaacattgtcttgctatgccaataaaaatggcatgatcaaaatgtttagataattcttttagaagcaattttcagataaaaaataaatttgggaggatatatttttaaaatcatgttcggaaaaaagtaaaaataatattgtttatgtagatgaaaacattcctttggaaggtacccaaagagtaaaaaaaactgtcatagaaattatatcgttggaatatattggtcaccgaacaaagacaaaaatctactagtcttgtctatctcggtgtctaattgagtacatgttgctattttttggatggagtgagtatatttttgtcactcggcatagtaatttttagttttaattagcattaattgctgtagcatttttttttacgaataatagagaccagcatttgtacattctatattatattttggggccaccaagatgttccccttcctcgcctgatttttttccttgtgattaattcttggtagcttctgctcctgccaacattttttttggatatctaaaacaaagacacaaggtggccaaattcagcttcccttttcttcctttttctgtgtcttttttaatgagcccccaacagcattttcagaaaggtctaatccttaaccaaccttgtaatcctctgcactggccaccactttcctctgatgcacatgctgacatctgttgcttctagacatgctccaagaatcagtttcttttttcgcctttccataaacacatccacatcgctcactctgatcctttgtcatcaggcaacgctttgcagcagcagcaaatggaccgaggggtggagctgatggggtgcgtctgccggatcaagaactgcgccgtcgagctcctggagatggaggaggatctggtgattggcatggacgacgacgacagggacctgttctggagtgagctccagctgaagaccaccttcctttacattgatctgagccgggtgatctcctccagcgagagcgatgagcgcagggaggcgctcaccctgctcaccaacaagctcttctacttcttggaggaggtgattgatctattgctctcttgaatctcttctgaactctatcatggcttagccttttcttacaagaacaaattaatcttattgcttaatttgcaaccaagatgattaattttccttaacagagaagctgggcacaacaatatttattaatgagatatcctgacaggtgggcccttagaatctgatcttttgggcccagtttatagcagttaaacttgctactggccactatcaattagcgtgttcattgttcagaattgtctccgtgttgtttacatgtcaaagtagagtagcaaattcagcaatctattaatgtggatgctgttcctgaattggtcaaacagtatccatgggagtctaactcaatttcatgtctgctattttttgtctcatcatttgtgagccacctagtttcaaaaatgccccgttagattagaagtcctgtccattgattgcagataaatgctcctggtgacctcttagcaaattgtgatgtttctggactagtattacccactaaacaacaccaaatcgcccattgcattgcagttcactttgcaatgcagtataactctagctccttaactagccatggtcaaaagtggaaaacccaataggtttgttactactactagtttggtccttgttatgcccaacgaactaatttgacagcgacaacacaaacaaaggggtcagctaatccactatagtttaagaaaaagtctgcgtttgcgtttgatgttgacttgacttgaactgttcctgttggacaaatggcagctgaccgacgcggtgacgagcggaagcgtctccttcacgaagctgtgctacggcgacgccgctcaggctctccgtgaggtggtcgccttcctcgcgccgccgcagtagctataccctggtgggctcatgatcccagcacttcactgcactgcactgcaaatctgatatgctctgaattctgaaggcagtagggagagtcagaggcactagcaaggcaaggaacttctagaagtgtctctagaaactcttggagaaggatgagtctatggctcctgtgtaagaagcatgtgagaagaactgaagctagatcacccgtgtacatgcatgatgagatcatgagagcattgcctctcgagtttgaagcaaagcaagaaagatataatatcttagggcgtgcctctttccagcaaaaaaattcgactagttcttgttttcccttttgctcttgaatttatctgcctttgcttgatgagttataaaaaccagcgccgaaatcgatattgatgttcgaacgtggaaaaacaccacaagtgatccaatcttgatgatgacaacaaggcattttgtttgttaaaaatatttaattgaaacctatgtcccatgacactgattacatgcgctcctcctgatccactataattacagtattcacgatcctcaattggctagacggtcagttgttccaacacctctatgacattatcgctatcaagattggatcacttgtggtgttcttcctatgtcccatgacactgattacatgcgctcctcccgatccagtattcacgatcctcaattggctagacggccagttgttccaacacctctatgacattatcgctatcaagattggatcacttatggtgttcttccgcgttcaactatcaatgtcaattggtatcggtttttatgacaagtgatattagagcctatatctggaaacttcaaacaattttcagtcgcacagttgtgggaaacccataaaacaagtctctaggatcacatagttgatatgatgagagagattgttcgacctaccctagaacaagttttcgaggtggttgatgtgacgggagagattggtagtcacgatgtgtgataggagagattgttggatttagttatgtatcaaaaattgataatggggaacacgacttaaaaagtggggtgatatccatactcatacgacttaaaaagcaggccccatgagtactaggtggtttactcataatggattggtttgtgcactgcaatagtataattgtatggagttcatgtccatcgagttgtgaactaataatatagtgtgaaactatagcacacggtaaggttttctaaaaacgtacccccttcaatattcaatgtttgacgtaattagttatgttttagtttattaaaaggcactgttagaatgatttatatttttaaaaaattgtataaaatttttaaataagataaatgatcaaatgtgtgttcaacatataatggcatcaaacattgaaaatcggatggactttgtgaaattatcagactgtgactgtaatatctaaggttatgtatcacatgccagccaaaagcttttttatgttggagtaacataccgtaatatcaggaattcatcagaatttactctaaaatcaaacatctcctagcaattacacttaacgagagttctgctggaaacttgcagtttcgttatacttagctcatacagtggagagtgattccagagagtaagcacttgcattacagacagagacaggttaccttgtataactaacaaaaaggcttttcctgctaattattcatatcaaatttctatgctacacctctgttaagatcgccacttggtctggagcagaagacatcaggggagaaaccaaaaagaatcgatatgtgcaacaaagaaactactgcaattgccgaaaaaccctcgctatttcgatcactagtataataacaatattaatatatattgcctgcagtcttcaatagaaggcaagctcgactgcttttatttgaaggccatgtaaccacgttacttgcatttcttccttcaacttccaggcacaggaaaagcaagatcaatgttttgtctctgcttctccatgcagaaatcgaggcaaatggctctccaaacattaacataatcttcaaatttctgctgaaaattgaagccaccttgtttggctgtggcttaccattctcttagctcctcaaatggctgctgccgaaaacttgtgcctacataaagtaaataacaggtgcatcaagagcgagcatttcagcaaggaatccaatcggtaatagagaacaaaaatattaaggagatcagttttttatttatttatgcacagtgccaacaaaaactatgaaaccacttaaaaattgttacggaaaagctagtgagtgtgttctagtttctctttagcatctactaacaccgtaataaatatagattgctaaatctttatatagtttcaactacaccagacattgaaatacttgtacttaagttgtttggaattaaggattggtcacaaccaaaatggatacttgactttggatatagttatccattactcaaatcgagaaatgtttttttttatcttaaatctagaatcgttagcagagcaaaacggtagattacgggaatacttcagagcagaaggtgttagatagatctctctccccttgagcccaacggctcaagggggccttgaccgcgccctgatcgggggcgcccagcccaatggctggtgggcccccgtcacactgcgccatataaaagaggggtggaggccggcacggcacatggtacgagattcaccgccgccgccaactccaccccacaaaaccctaatccgatcgagagggggcgcagccagtgacgggaaacgccaccgccgcgccacgcctcatcgccgggacgtctacgaccaccactgccgcagccgtcatcaccgtcgacctcaccggcgccgcatccacgtcaagccgcgacgacaacgacgatgtccggcgcctcttcctccacgaactcctcaaccggtcggtatctaaaccctctccctttcatctacaatgtcgttcatcaaacccaaatagaaccacccgactagatctaacctaggtgatcctagagcaaagtctaacaatggtatcagagcaaccctagtgtttagatcgtttcggggaaagaaatccaaagaaagaaaagcacaagatccgcacggatcaaaagaaccaaaaaccctaaccctaattcttacctcgtcgccggccgtcgtcgacgccggcaacggagggggggaggggcaaagaggcgccgcctaggagccactcgacggccgcgcgcgcacctgcacgcgcgtgccggcgagggggcccgcggcggcgccgccatctccgtcgtcgccatctctctctcacactgtgggggttagagacggtggggggagcggagaagagaaaagaaaggagcgccggccatggcgcggcggcgcgagggccgccggcgtcggcgacgccgctcggcgcgaccgcgcccgcccgagagagagaaagagaggagaagctagggtttcggcggccggccggggcacgaggggttttgatccccgttttcggcgcccggccgtccgatcgcaaaccctaagatcggacggccggcggcggccggaccgaaatcggcccaagtggggagcgcgcggcggcggctttcccggcccaggcccaggttgcggcctgggggaggggagggggcgctcgcccgcgcgcaaggtggccatgggccgaccggcaaaggccggaaaaaagtccatataaggtccctccggggccgaaaatgaataaaagagaacagtagcattttttccattttattttgtcaatttttcatgcaaatttcaatagaattttgaatagatttttgcatgttttacctctgtttaaatttgaaccaacgggagaattttcacagagagagaattacagagatttagctactgttcatatgattttatatagtcttccgctgcaaatagatgaaattgatgaaaattagtgtttctaaaattaaatttcgaaccaacgggagaatttaattttaggaacattaattatgtgctatgatgttgtaattttctgaccaacgttgttaattgcaatattatagttatggttatatgtgttatgtctaattctgcccaacggtgatgtaggcttaatgcataatattttaatgttaattttgttctcaccgcacatgattatttcaggtggctactccttgatgggttgcattaaagatattccgaccctaaaaggagataactacgcagaatggaaaagaaaactcgaccttgcttttatcttgggagaggtggactgggtattgactaccccatgtcctatagaacctgctgaccttgtcagaggtgaaaatgagtcagatgctgactggcaaaagagacagagggacaatgctcctctcgtcatgtcgtatgacattgaacaaaagaaatggtccttagccaacaagaaatgtttggctgtggtaaagaatacgattgagcctaccatattgggctcgatcccagagtgtgacgctgtctcagagtaccttgaaagaataaagagtcagtttactggctcttcaaagacttatgctacacagctgatcaagcagcttgtgacagaaaggtaccatggaggtggtgttagagaccacatacttagaatgagcaacatggcttccaaattgaagccaatggatttgggcataacagatgactttctggtccatctggttatggcctcattgccaaagcagtttgacaattttattgtcaactacaacataagtccagagaaatggaactttgagaagctcattgctaattgtgtgcaagaggaggagagaatcaaagaatcaaatggtggttcaataaactatgttaaagataagaaaaagaaccacaagtctcccacctcaaaaggtaaacagtctcagcatctgcctcaacaacaacagttcgctgttgagaaagatcaatgtctccactgcaagaagacaggacactacaagaaagattgtcctgactttttgaaaatgatcatggcaaagaaaggtgagaacattattacatttgtaaatgaatctcattatgttggttactctagatccacatggtggattgattctggagcaactattcatgcttgtaattgtttaaaggcattccgttcgacgaggactacgcaaagaagagaaagcaccattagagttgccaatggagttgaagaaaaagttgaagctgttggagatcttcctctagagctcgcgaatggcttcatacttttacttcgagatgtcttttatgttccttctttgcaaaggaacttaataagtgtatcaaagttggattttgatggacatgattgccgctttggaagtggcaaatgtgaactatggcataataatgcatgtattggtcttgctgtgttgcgagacgagctttatttgttatctctttctgagaatgtgaatgttgtgtcctcgttgacaaaagaaaacaagaaaagaaagcgaactcccgatgtctcatcgaaattatggcactgtcgtttgggccatatttcgagggggagaattgagagactagttaagaatgaaattcttcctccattggagttctcagacttagaacaatgcatagaatgcattaaaggaaaatttgtaaagagcatcaaaaagggtgcaaaacgaagcgcaggaattttagagatcattcatacagatatttgtggtccatttcctgtgaaaaagtgtggatggctatgactcgttcataacattcacagatgattactcccgctatggttatatttatccaattaaagagcgatcagaagcactggataaatttaagatattcaaagctgaagttgaaaatcagcatgatataaagattaaagtagtaagatctgaccgtgggggggagtactatggtcgacatacgccttatgggcaagtccctggaccttttgcaaggttcttgctagagaatggaatagtagcccagtattcaacaccgggcgaacctcaacagaatggggtagctgaaaggcgcaaccgtacccttatggatatggtgcgcagcatgatgagctactccacactaccactcggtttatggatggaggcgttaaaaaccgccattcatattctcaacagagttccaagcaaatcggtgcccaaaacaccgtatgagctatggacagggagagtaccctcgctaactcacctccgtgtgtgggggagtcctgcagaggccaaagtatttaacccaaatattgggaagttggaccccaaaacagtcagttgccattttattggctatcctgaaagatcaaaaggctatcgtttctactgtccaaacagttatacaaagtttgtaaaaacgagacacgccgtcttcttggaagacgaaatgattaaggggagctcggtagttcgagaaattgatcttgaggagaggcgggtgtctgtacccgctccgtcgactcaggaacctttcttctctctacctgctgatgttgtgcctgcaatgcctgtcattgaggtaccagcacctgttgttacccctcctgtggcaacaatgaatgagagtgaggaacctgttatacaggattcaacagaaatggttgccacaccagaggaggagctacaacagcctcaaatagataatgtgccagtacaggagactcatcaagagcctcaggtacaggatgtgccaaatgtgcaggcccctagaaggtctgaaagagtcagaagatcggctatccgtgatgactataaagtttataatatagaagagtcgcatatggaggatgatcccacctcatatgaagaggccatgagaagcgctcgctcatctgaatggttggaagccatgaaagatgaaatgaaatcaatgaaactaaacgatgtttgggatttagaagaaattcctaaaggagccaaaacagtaggctgtaaatgggtctacaaaaccaaatatgactccagagggaatatagaaaagtttaaagcgcgacttgtggcaaaaggcttcacgcaacgagaagggattgattacaatgagacattttctccagtctcttgtaaagattccttcaggattataatggcactagtggcacattatgatttggaattacatcagatggatgtaaaaacggcatttctaaatggagatttggaggaaaaagtatacatggcgcaaccgaaaggttttgtcatgaaaggaaacgaaaatatgggatgtcgcctaaagagatccatttatggattaaagcaagcttcgagacagtggtacttgaagtttgatgggacaataaagaaatttgggtttcaagagaatgtcgaggacaactgtatttattcaaagtttaagaatgggagatttattttcctaattctgtatgtggatgacattctactggctagtagtgatgtcagtctactgcaggaaacaaagaaattcttgtcctcaaactttgacatgaaagacctcggtgaggcttcatatgttttgggcatagagattcaccgagatagaacaaagtatgcattgggactttctcaaaagacatatatagaaaaggtgttgaagaaattcaacatgtacagatgcagtgctacacctgctcctataatgaaaggcgaaaagtatggggcatcgcaatgtcccagaaatcagtatgagctcaatgaaatgaaaacaaagccatatgcgtcagctgtaggaagcctacagtacgcgcaagtgtgcacacgacctgacttggcatttgttaccgggttacttggcagatttcagagtaatccaggcctagagcactggaaattggtaaagaaagtcttgcgttatttgcaaggaacaaaaggcctcatgctgtcttacagaagatcagaatcactccagatagtggggtactcagattctgactttgcaaaagataatacaaagtcaacatcgggatacgtgtttaccctgacaggaggagctatttcatggaaaagctcaaaacagactatcactgcagggtctactatgtatggcgagtttatagcatgctatgaggcaacggggcaggtgaactggctaaagaagttcatacccggtttaaaggtggttgacagtattgagaaaccgctaaagttatactgcgacaacgaacccgcagtaatgtacgctcacaacaatcagtcaagtggtgctgccaaacacattgacataaagtactatgttgtgaaggacaaagtccgggatcaaacaatcagtctcgagcacattaaaacagaaaggatgctcgcggatccgctcacgaaaggcctaccacccaacgtgttcaaggaacatgtagccggcatgggtttaagggaagccttatgaatcctggactacagggcccaaaagtaaagtatctgtttctgaatagagatgtgtatagtggctgtcgaatccatcggcgattgaccgtgacgatgaaacatgctctatttacaaatctgtgatggaatagaaaaagctaaaagaaaaagtgagatcaagggggagaatgttagatagatctctctccccttgagcccaacggctcaagggggccttgaccgcgccctgatcgggggcgcccagcccaatggctggtgggcccccgtcacactgcgccatataaaagaggggtggaggccggcacggcacatggtacgagattcaccgccgccgccaactccaccccacaaaaccctaatccgatcgagagggggcgcagccagtgacgggaaacgccaccgccgcgccacgcctcatcgccgggacgtctacgaccaccactgccgcagccgtcatcaccgtcgacctcaccggcgccgcatccacgtcaagccgcgacgacaacgacgatgtccggcgcctcttcctccacgaactcctcaaccggtcggtatctaaaccctctccctttcatctacaatgtcgttcatcaaacccaaataaaaccacccgactagatctaacctaggtgatcctagagcaaagtctaacagaaggaagcttaccaaattgactccagggagtatgtaactagctagcctgtcatcaatcgaaactggcagcggaggcattttgctcattatcccaggcatttggctcatgctgtttattgagataatcatcacattagatatagcatggaaggaaataaaaaagaacgtatgcaagtaatagtaaaatatacctttgtagaagatcactgatgttccttcttgcatgatggaatagatcaatattgttctgaacctgaaaggggtcaaaaagttgaaacgcggtttactcctgtgttactaatggttccccatatataaaccaaggaggaccaaacaatataactctaatcatatatgaatcattaaagcaaaatatccacctgtgatgtcataatattttctcctatttgtttgagaacccgagcattttcttccaatatattaagcattgcgcgatcaatttcagaggctgcataacggaaaacgagatagacgtgtcacaaaaaatggcacaaacagaatgaattaaacagaacaaacaatattttactctctccatttttaaataattgatactgggcactatttgtttcaaactttgaccactcgtttttttccaaaatgtttgcaaatactaaaaaagataccatattatcaaagtatatagtgtcatatatacatgaacatctcgttcatcatagtctattcattcaaagagtatttcgtggtcaaagtgaaaacactgatagtcaacactaacagttattttaaaaatggagggagtatgagtatttggtcaacaagacctctacatatgcttgcattgacaaataaaaatattctaagtccatttgcacatgtaaacattatcagaagtaaaaaaaagtacttttcataattttactgtttcactgtaagctgcattaaatgtggcttagaagccaggaaacacccgtgtctcatgaagcaacgaattttacatgtcgcaaaacgttgcatggaattttatggaaattcttcaccattcatgataacatttagaacaagaggccctgagcccctgagcacataaaagcagtgaaaatatttttgggctgttaaccacatggaccataaaaaatggcaaaagcaaagggaaacagttaattacacagcaacttcataagtgacacaccaacctccagactgaaattgattatcacgaactgtgttacatgccaaggtggaaggacttctaatatctgttgtctgaacttgtcgattggtagcccatgaagactccaccattttatcctgaaaaacaattttgatgagcaccagtggcatatatacacttggatgtataatctctgcacaaaaaagtagtgcaaaatatgaatagtagcatgcattttttcgcgtcaatttcagaactttttagggtgaaccagatttttccattttgaggacctatgattaaaagtttattaatatttccgtaattatggggaaatccgtttggtttgaaaatactacctacagagaaaacatgccataaaagtctaaaagtttcatcttcgctccatcgtttttacaattaataatacatggaactcaagaacatggttagaaattccaaatttaatatatgtttcatatgccaaaatataaattacttcttaataagaagactagaagatgattaacacctttcgatctcttgtcttttttccaagataatgttcatcggtcttccttcgtcttgtattttcctttttctgtacaaaaatatggttgttagtaccattaaaaatgaaaagggagaaccacatttgctatcacacaaacatttattagacattggtatatactccctctgtttcaaaatatttgacaccgttgactttttagtacgtgtttgaccattcgtcttattcaaaaaatttaagtaattatttattcttttcatatcatttgattcattgttaaatatactttcatgtacacatatagttttacatatttcacaaatttttttgaataagacgaacggttaaacatgtgctaaaaagtcaacggtgtcaaacattttgaaacggagggagtactttttttaggggacattagtattagatacaagaattactcaaggtaaaaccctatgttctgctagatcaccacaagagaaaatgttaaatgatatcccgactgttccatgataaaaaagaagatatgacaagtttagcatggttgcataatctaccagcctactcagtgataccagctcagttgtctcaattgaacaaatatatttaaatcaaaaagttataacacttccaaaagatgaacaaattattgtgaaacaagacaatgccagcttttgactgcaatgtttttaagaaatattagtagaggcagtattgctagcactgtcaaaagcagagaccttgttgttcctggaccaacttatattattctagtacacactagacaaatacaaaggcacacctgtgagacaaacagctcaaaagaaacttgggaggaccaactcagaccacactaactttatgttctataatagaccattatagtatttatatagatgcggacaaataagtgcatctagcacatgatctacttttgcatacgcggcagtggtttagtggaattatagtgatatcatcttgacaagacacaagatataaacaactgttagtcccaatccataagctgaggcagaccacatattcctttatataagaaaaggtttctcttattggattaacatcttgaacaaattttaaattttcagatttcacgtttaaacaagaatctatatttattttgtggatctgaaggaaaaacattatttatatactgcaacatagataaaatgaatcagatactgaccgccgccatccattggcatctcatggctacatcccttactgtcttctctggtaacatagctgctatcttgatatacttcatgattcccggttcatttgcatatctaacaaattttatcaccagtgcacaaagatgattgaagattaggataaagtgatgaagacggacgataaaaactttgtgataagatcattagatccttgcttactagacaaatataagtagtggatataactgaaaatgacatattcataaaagaaatagtactggactcaaacaaatcagttcattctaaaatgtagaagttctgggaataactgctaatattccttttaatccgtagaattatgggataaaagaagttagcttatgactattgaagcatgaacaaggcaaatactcattattctaaacagtatatgacataaatattttgtaatttcatttttgaagtgagataaaagttctttcaatacaagtggcagtttagcatacttaaggaggccgtcgttcagtagctgtaactcaggatatgaccaatccacagccattggtgcagcatacttgaggctctggttagaatcagcaagcatgttgggtgaagatgttgaaacaatcgttgaaggtgtggtgttcagcaatgtcatatcgctgttcatccctcccgaactggctgggcaaactgggatggctcctgagccattggcaattgtgcttgtttggaatgagaccacatgttggttgcggaatgaatgtggaaataccggatagtggttaggatttgttgacatctgcatgccagatgaaattctatgctcccccttcagcctcaaaaaaacataatcaagctttggaagaatgcttgactttgttaactttctttttcaatgagggaacttttgtagcaccagttatacttccgttttgatgaagcataggcgagttcggcatccagagctcgataaacccaccaaaataaccaagggtgccatccaaactacgacgatgatatcaaaactttagcaaaaatatctttccaacaaccacaaccagattatagaaaatagcacgatacacttcctgcaaaagacatgaaaggagtgatattagtgccattgctcctacacgaaactaaagtatttagaggagtccacaacattggtagtattagtaatcattgaaactgatacgatctcaaaaaacattgaaactgactccaataaaaagatctttcatatattaaattttcaaaaagaaccatatcacattgctggtttactagcctgaagagtaccatccaagtatcaaatgaatggacaatctatttttgtgatagttatttgagggtataaatgaatggattgactactacaaagttgaaaagttgcttgagaaaaatattctacttcctccgtttcacaatttaagtcattctagcatttcccacattcatattgtttataatgaatctaaatagatatatatgtctagattcattaacatcaatatgaatgtgggaaatgctagaatgacttatattgtgaaacggagggagtaagaaaattttatatagaaaattaaacaaggtgtgccgtttaggagcttgggaagtgtacaaacggaaatccaaaatccagaatgagaaaggaacagggctagtacggtttaaattttgaaatggaagcttcgtgctagaaaacaatttaccataaagggagaaactctttctttgatcactcataaaaaatgcatatcaagattaacaaaaagaaactcagaaatatatgttcgtaagattttatgcttcattacttcagaacttaaataaaactatcattagcagtttagcaccattagaaacaccagcgcaccacatggaatcattgtagtcatgttagcaatagaagacatgactacaaaacagcaagagtacagttattcagctcaagacaagtatctgaatcctagaaaagatcatctaagaaaacatggttaattagttgatgtcttgatgaattgagttaacaagaaagaacatgctcatatatgcaaagatatattcatcctacaaacatctcaagttctcaacatgaaagcggattagagacctataaaagatgctggcttgatatcaagagaaataaaaagaacagagaggttatcaagcaaaaggaggcaatatatctcgaagctcatactcacagttcaaacttgaaccaaatcaaggaagcaatttgcaagaaacaagaccagtgttctgcaactgcaaggacgactgatccctacgaccacaacaccgaatcaaggcagcaagccctgcttcgtaatcgtaacagccaatccgtacatcgactctgcgataacagagcacatgaagaagaagcgatatgaacttactcctacttcgctagtgcttggaaccaaaggcatcaagaagaggaacacaaaaaggggctaagctagctagttataatctgtcctcacacactactccagtagacaagcactagacaaagacttgaacagaaagccacacgaaaagatcgaatcaagcaacgatgattgcacgaaagacggcggccccggccccgggcgcgcatacgtgcgaagcaccaccccgacgcgacgacgcgacgcccggacctaaggtcgtcacccccaattaaccaagaagaggaaactaataaccccgcgaccacggtgccgatccgatcctaccaaaaccaaatcaagatcccccttagcttgcgtacgtgcagatcgagaggaggcgcacctttgctcgcgaaacgcgccgctaacccgcgcggtgtggaagcgaagcagccgcgcccgcagattcttggcgtgtccctgaagcggcagcggcggcggcggcgagtacacgggcgcgcgcgtacactgaggtaggctgggcagtgcgtgaggtgggaggtggtggcgctcggctcggttccctcgtttggctcgatctcggccgcctttaaattggtgcgcgtccacctttgcgccttccaatggggaggcccagaaaagcggcggccccgcctcccaaaggcgagagagaaaccggacgacgaacgaagaaagaagcagagccaagctctcccctgctcctctcctctcctctccgcccaaaaaagccaaagccgtgtgccgattccacctcaacttgcaccaccaaacggaagggggagagacaacgacgacgacgagagaaagagagaattcgctgctgctgctgctgctgctgctgctgctgctactgctgtgattgccaggacagagagagagaggaggagatctcttggaattcagcgctaggagatggaaacagtggcgccgggattcccaaaaagctaaaccgaacaattattgccactatttaactagcactgtttcaccttttctcgtgtcgagagaaccaagtgctcctcctcctcctcccttaaactaaagttttactaaatctttttcttttcttctactgctctgtttactgctactgctacttgctccgattgtacgcatgcgtttggtgactcctcctgctttgttctggtggcctggcatcactcactcatcaggaggagggggcaaaaaaaaaaaagaaattcagaatgatgcgtgcgatgtgtcgcggtggtgtgtgtactgcttggttggtggtcaactaggccggtaaaaaaaaagaggtcttttttgttcttgcttatcctcatgggaggctgcaactggccaaaatgcgagcttggtcctacctggagaaatgggaaatggatgtgtaatttctccacgtgtcgacgatcctgaactggtagcacgcaacaggtgggctgagatgatctcatgtatgatgcaaaacatgggatagttctgggattaggattaggacggctagactctgtagatgctaactgcggttttctttagctgagtgctgctcgaaatgggaaggaaaagttggttccttttaagggtagagtttgcttggtagtagctcctccattcacatgaggaaaccactaatcgtgcaagatcaatgaaaatacctctccattaactatcctgtcccaaaataaaataattataattctagattcacattttcttctaaaataaataaaaaaaatatagtcatactcatcacgtcaattatctgttatttaaatttctcttcattttaccctcaactaaccaaccactagtttataatagagaatacctaaattattttctctccctcctactcttaaagttatttttggacgaagccggtatatagttatatgaagtagcatattcgatcttgacaagcaaaaactcagtcactcttaaagacttgagaagctacctattactccataaaaaaaattccaatcgatgctacgattagatttttttttatggagggggtatggctcagctgtcaaacagtatatcaaccttttctgatgttcaacacaagaactctatgcaaacagcatttcattgaaaaaaaatgaaaagcgttgactattcattcggtttttttttcatatatccgcgggatgcatgctcattctgacacgttggatttgagcaggtataaaataacatgctcatgaaccacaagggtcgatattttagtactagaacgaccattcaggtagaaacgtgcacgctcttctattggccttttgattagttaatcttagccattaactacttaattagttataaacgacttttggctaatcatttacacgtaagaagttttttttttttgcgagggaagtacgagtatatattaattttcctactgtgaaaacagtacaacaacctcacagcatgcatatagatgcagaggcaccgtatacctgatgcaggtgtgtttttaacactgttcggtagttctaattttttactcagtagacgatcgagtctgaaattccaaattttgcacacattgaggaaggctttactaatggaagatggagtactaatcgtatttaaatattattacggcaaaataattatgcaaacaaatatccatggtcgtacaatagtattgcaaatcccaacattccttttgtttctgaaaaccttagcctatgatggctcagcctcaggtagcaaacgtcgtgggcacgtagctagtggagtggatagatgcacgggtgaacgagtgccgtgctgtgcatgtgctgactggcccgccagaagccacgcggcggccatgcaccgatgtacggtgtcagctggcagacaaaccgtttactaacattcatttcttctttttaaacacattaccgctaacaacacagcttacattcaccatataaatgcacccgtacactaaggaccatttaaatcgcaggattgcgaaaatgtaggaataggaaaaacgtaggattttgatagaaatataagtgtaaaatagaggattgcaaaacgcaataaaaactaatgaataaccatttgtttgaaccgcaaaaaaacataggaatttgataagagagatagactcaaaggaaagttaccaagagattgaagctcttgctaaatttcctctaaaatctctataggattacccattccatagaaatttcaaaggattcaatcctttgtttcaaagtgcttcataggaaaattttctataggattaaaatcttcgaaaatttctatgtttttcctccaaatcaaagtggcccttaattggagtatatgagcatcagacttaacataagttgataaagttgccacgatcatctctctgtcaatggatttatcaaataaaaaaaataaaataattagtcacaaatactagcactcgtgttaactctatatttgaaccatattcatttaagaggggttgtactgaccattgaattttttaccatgcgtccctgccaaccagatacactctcttgttttaaaaattaaactagctatgtagcccgtgcaattatgcatttagcatccatactaaattattttacacataattttcttcaaaatttgttaaaatagtcttatcattgtcttagaattttaacaatcgaaccttatcatcgttgggatttcaattttataatttttgaaagctacaccagtcgtcaccccttatttatttgtcgctccattatttgcttgtctagtctaccatggttctttttcaaatttcttgggacatttaaagatcggatcttatagttgtagagttcattatcacgtcagttttatttttatagattttagaagtactaccaaatgatgtcaatatacacctatataactcgcctaccgcactatttattgttatttggatttaaaaaatcgaaactaatcatgtttgttttttttactttttggaagtcgcgtcaaccgcatgcaaccctactccttcacggcctacccatcatccctcctcttagtcatcattgggaatctaaaaatcaaaccaaatcatcttttgggtgttaattatgttgttttataatttttagatgtcccatcagccgtcatacgtattccttcacgacccgcctgataccctttctctttatctttctctttattgtcatttgtcagtgttttgttatatagatagattgttcttttaatatttcttattttttattctgaaattttattattataaattgtatttctactcatactctcatttttattctaattttaaattttgaatattatttcttattctgtattttaattaatccttgaaatagttatatttgagagggagtatacatgatcggtactggagtgttacttagtccagtagataacccagggaatagttaatggactaaaatggtgtttaagtatttcaaaatgttcttagctgactacttcatggttcatgcttagcttgcgtgagttttcaaccaaaaaaaaaaacttgcgtgtactgtatcatagtgaatagtttggcattgtcacgtacggagtaaggctggcgtctagctagcctagttaggttttcttatagaggagtttattcttagagagccgtacttgatagggttgggcaagatcgaaataatttggttcggtcttgtgaccttttaaacaagaagggcgaaatttattatgtcgatattggacgatatgtagatcaagaatggcgaaatttattatcttattgtagggatatattaccttcgttctaaaatataaggcgcaactattttttaaagtggtttcataatataaggtgtgcatgcatgtaattaattagcacattatctcccctaaattattattattttaaatcttatattcacaagatctttaattctattggttacatgtattgtattaattgggatgattcatgacaacgatgagatattaattatttcttggtctttggtttaatggtggttgtgccttatattttggaatggaggaagtataaattagacaaaattggatgttcttagtaaattttgccataaaaagaattgattgtgcacagagagaggagaaattaccacacactcacactaaccagatcagctattggctatcgcccacttgtacgcagtagtttgtatgtgcatgtaaagcattctccattatagaattgatggataaaaataattgcgccatgaagcttaacgctaggcgcccaactgtcgttttctgtttttgataaacaacacgtaaaagtgacagaggtcgaaaatgaccatccataatacaaaaatattttgaccatccaaaataaagaatatttatacaattaaggaatggatgaaactccatgcaaggaagatacaggaagaattgtttatgtgatcattgacatgtgggtttacatgtaagtgaccacgtccctctaacttcaccttataagattttaatccatatatggcatatatgtattaaaaaatgcaaggttgtggtcatgaaaggggattctcatggttattattgacatatgttacaagtatataagtatccacacatttaaaatgtatttgatggaatttgctctatatatacatgccactagtcaaaccctctaattccaaattataccgttcatattcatcttattgtgaaattgccatcaatttgccgtcaagtcaaaacccttgaccagcaaaaaacaattactacctccgtcccaaaatattgctatctagaatgggacgtaactcatcctatgacaacgaattttaacggacctccttcagtaacaatcaattattatctccgtccagatttgttatcctaggatagatcatatctcatcttaggtagtaacattttgagatggagaaagtatatagtattgtacacatgttataattttgtatttcaataaacataatctaaatttatgcttttatatgtgcatgtaacacatttggattttgatacatcaacataagtgcatcaataattgaaaatgcttgaaaccagaatatatgttagaacttagcaaagaatcttttagaaaccccgaaagaggttagcgtatattccctctgtattaaaaatatattactccatttttacctggagtgtttaaaataagaaaacaaaatgccccttttaatagaagttgtattgattgatagttatgtaagaatttataaggagtattgaaaaataaaactcattgatttactgaacaacggtaaataagaagataaaagtaaacttatttcaagacaaatggcataggctagagataaacttatttgggaatagggaagtatacattgctagatggatatgtgtcataacttaaccaagggcggaggtaaagtataggagggggaggggggtgctgaggaacccagttaagaaatttttttagctatatatcacctatttttcactatgtgttcaccccccctcagtacaaaagacttaggaacccacatcaacttaaatttgatctaaagtagagtaaattaagcaagtggtatccttctcaatttcattctacccctgcccctgaacttaacgagagtgacatctttatcgaaaccctcggtgatctattggcacttataaataaaaaccatatatagaattaaaggtgaattaagggttcgaccatggcggtgagctgattttcactaacaatatacttccattcttcatctaagttgacattgtttaggatatgattatacagtatcgaagcacattcatattattttttattgaagttattaataagatataactacacgcaagcatattaatgttgtttttagatattgttaacgccagaatttggtaagcccaaagtaatcatcggtctagagttagtatcggcttcagagtcttggaatcagccgatgggaatcgtcaaatcgccagcagttgtgttcttggtggagtcggatcaattaaagaaaatttatctagaagagtccgagtttaaggaggatacagcacgtgtaacgccctgattttcgttcgggattaaaaatcatttaataatgcatttcctagaaattaaataaaaagttaatcaatttaatcaagtaaaataatgggagaatttgaaattttcccttaaaaatcaatggccgggaatattttgtaatattctttgtgccctaatgtactctccgaaattttccgtgaattttcggagctcgagaaatagttttaatagcacaaagttcatttaaccaattaaaataaaaagaaaagaaaataatcttccccttcctccctttcgggctcggcccaaatcccttcccctccggcccggccgccctctttccccctttgggccgccggcccagctcctcccctccctctccctctagtcctcttttcctcccctaaccggccccctcttcctttggccgacaggtgggacccgcggccccacctgtcagctcctccctcttcctccagccacctcgccagttaccacccatggccgcctgagctgccccacgtcgccgcttccccagcccacctcctccaccttgcgccgctcccgcccgaccgtgggacctcgccgcccacgaccccgctctcctcccccattttccccctccaaaacaggcgccgaaccaccccactcgcccacgtcgccggcgcctcttcccccttcaaatccgcctctcccggccacgttctccccctccgggacctatataaacgactcacgtgcctcccttcatccgttttcccctctccccgagcaccccgcgctccctagacacctccccaccgtgctcccgtgcaccaccgctttccggcgagctccggccggccgattccgccgctccacccaccgccgcgccaatccgccaccactgtcggcttcgcggcgccgtgccgcagcccggcctctactccatttcccctctccgcctctggaacaccgccgcctcgtgcaccacctctctcccccgccgccgccgtcttcagccggccgctgctgccgcgttagtcgtcgccgcacctcgtcgtttgcgtcgtcggcaacgctgtgccaagctctacctcggcctctgctctgtttccccatttcatcgccgcaaccacctttccgccgtcgacccgagctccgctaccgccgttgtcgtctcaaaccaccgctcctcaccgctccggtcgcctatttctctccctaaccgctccaatattttccctaggtcttgccggccctcggccgcggctccaccgtggtcgggcgtcgtcggaacgccgttcccgtcgcctcccgtgccggtcgccgccatcttttccgccgccggccacctccccgtggtcgtctcgccgtcgccgtcctcggtgagaatccctatcgccccctctcctttttccccatccgccgctccccatgcccgccaccgcgacgcgctgccgtcgccggtggtcgtctggccgcgtgcgcgtagccgccgtgccatggccggccgggtcggtctcggccgcgcccgtgccccagccgcgcgcctgtgctgcggtggaccgagtccaccatgagccaccccctttgacccgctgacgtgtggggcccgcctgtcggcgctggttccccttgctgacgtcagcaaatgccatttcctttgtaaaaataaataataattgcgcaataaatcgagtttaattctagaaatccattaaaatggctcaaaacttctaaaattcatatctaactcattcgaactccgaattgagccattcaacttgcaaaattcatctaaaattgagctctacatgtttgtttactttttatgtactgtttccttggtttttattagagtttttcctcgttttgcgtgccagcgtgtagaatccgtcgtttcggaagtccgcggtcgcgaggaaaagagttcggaagatcaaagtgaagaagcaaggcaagtcacacattccccttgagcatgttgatcccaatttataaatgttttaccgtttgcaaataaacatgcatgtcttgctaattacatgggaatagggtttacctatctgctcgcttgtgccatgtttacttgatatctatcctttgtcaaccttgggtgataaattgactagctcgtgttacttatgtgacctagctagaactatatgcttagccatgcttaattaccactagctcagtcgatgggataattgcagtattagacattctagtatcttgttgagccgcgtgctcgagacatctggccatgttttgtggttgtaattatccaactaaaatgcgactgaatggtgggctgtgggtgcatggttttgtgagtcgcacccatggcaattaaggaccggttcacgggaaaccctggaagacttacagcgcttgccacaagcgggaatgggtaactgcttgatctgaagtatagctcgaccctttcctaggcaccggtggcgagggtgggcgtgatggagttgggtcggccggggtgtccggttgtccagctgccggattcaccgcggcgcaagaggggaccgcccactgccttttgaggggtgggggtgaaaccttagcgtggtgtggatggttaggggagggttatgcgaagggtctcgtcacaatcactcgacatggtgacgtgtgcatcatgggcacatgatgacgcggtgacatgtcggtgggttgtgtcttgtgggtacagttgtgcacctctggccagagtaaaactattcgaatagccgtgcccgcggttatgggcgatcgaccagattcaccgtgattagtctcacacttaataaatcgacccaatgcactgtagtacaggtgggttggttgggcctgttcaacgtggtgtagcgttgatcagtggagattttaatgttactttaattactcaacagttttactgttttgctcaataaaatgttttacaaccgcctttatgcaaatagccacaaaccgtccttgtgttccccttgcacgtctgcatcgttggtgtggcttgctgagtacggtggttgtactcagccttgctattattcccccttttcagaagtgtagtgcttctgagctgaagatggagttagaggaccaaggctcagaccccagttgagttttgcctgtggagtggagctgaagccccgctaggatcgcctttttccgctgctgctgcttttgtttcggtgtgaggactaagtgcctcttctgtaagtattttacgcgttatttacgtttggaactgtttattacttgtcgttttgtgtaccctggctggtcctggacagggatttaatgcacaaaatagtctggaaatttgggctaaatttctgggcgtgacagcacgacaagtatatctattaattaggaatagttttttagtttccttttgtctttagaaaaatatgtgtttagtgtccgataaggactttatgttttccttttatctttacgaaagtttctttcttgtcctacaaagactaatatctccccatgggtataaatatgtacacccggagtcattgtaaactatctcttgatcaatacaactactctcggcgcatcgccaccctctttaccgaggtttttacttatcaaccagcggaatttggcacttgaagcggggctgcatcggctttcgatctccggcgaaggggtaagtcctacgtttcgccggccccagtgaatctatcggctacattggtgttgttcaaggctgcatcgcttcgatctcttggatcgctctgatttggttgatatatttgcctacctgatatctcaattctatctctagttgcatttgtttagagacacatcggtttagttgggactgtcttggttaggttcgatcttctgtcttagccgatatatctctacaatcacaatgttgttataaatagatttgttatatccatcacattagacagatctatcggctcatcgagtattaaattatcatatacaatctcgtgctgcatcggttagattcgacctactagattattgttgataatataagtcttgttaagccgataggttcatgctaatgttttatcggggtgcaagctgataagttatctggacgttgcatcggcttgtaaggattgcatatacatatagttggatttagccgatcgcaacaaaagttttactgtttaatctaatcttgtggattttatgacatcagacctccagccgatgtatactttaacctttggatcaatacttgtttgactatatcatattgttagccgattggtttctactggattatattgctatattattgctatcagccgattgcctttatatcattatctacatcggacatatagccgattgctcaaaaccctatcgctatcggctggtatcggcatcggctggaattgctccatcggcttgtcagccgatcggctcattgatctgctatttgtatatcttgtcagttgcagtatcaaactgactggcacgcccgcatctcaacaacctttagacctgcactggagctaagcagatctctcaggccagtgtgtgtttttcacgtcaacagatattactatatgtttttattttctatacttggtgacaccctattttgtacaacttcaaattccaaatccatgtcagctctagagtttgtaaattagtttataataattttatattttatattttatctaaaatagaaacaaaagttcacatctaaatgttatcgatgtaaccataggtatagagacctatatattctgggttagaaatacacaactttaataaaaaaatcttagttctataagagcgaccccaaataatacctaaaaaactttttaaattgaactaaacattataaaacactaaaacaggtaagtttttctattacacagtatacgaacacacaccactatacacatagcatcatactaacgcacccgtgaattcatcctctaccacacgttcaaaagagacatcaaccatctctgcgcacctcccaaaatcaggctctcagatattactcgctcacagatggcttccgcttgcggccttccctttcggggcttgacgacgctgtgtcaagtcggcaacgcgcagatgcaggtggcaaggtcagcgaagcgaggcactgcgcacactggcacgacgcgcccaatgattggctcgcgagctgagagggccgcgaaaacgacgcgcgctaagcttagcttcggtgggcttctgcctgtacggcgagcgaagagcgatcgatggagatggatggatagtgcacggtccacgcggaagccaccaattttaaccgatccaacgtacacaacacaacaaaatcacacgaagctcacagcagcagcagcggcgtgccgtactgccgttcccgtgtcgtagtgtgtgtggcgtggaaagcgagcgatccgcgaccgcgcaaacgttggcgaagaaaggaacaggttttacgtacgttcgaccggttagtgccaaaactggatggagcttttctacttctgtttctcgcgtcaagatcgatcggtcgatcgatattggactaccggctttttattcgccggccctgccttgccgatcgaccgatcttttgcaatactggggaaatggggtgaggtaatcaccagtttagtacagacaagtcgaattgtattctttaagatctccctttttttttgcttttgtttctttttgcaaaagtttttttggttatataattggatacttgtgccaacttatggacaaatgaatcatcgatgcatcaatatgcatcgatgtatgtatggtttgattgaactgaagctacacgacggcggtagcggctagggtttcaagttattttgctttttgggatttttattttttttgccaaaactattttcgcgtaaagtcgctttaggtgaccacatacgaaaatcctgttttcgcatgtagttgcactacctgcatggaaaaataacagatatttacagacacctaggtgtagacaggccgaaggcctgcatgtaaaaatatgttttgaccgtctggaaaaatccttatttagtagtgttttgctctaattccttaatcttgtgtgccttttggctgttattggctttctcatcggcttttcgtatgcacgttaacttcttgagggtgggaatgcctcccatataggcacaagtacacaaccgctgcaccaccacctggtccttggatctagtgacctcaatctcatcatagcccgcatgtggcattgccctccatgcactcactctcggaagcgattgccacgtacactttcacctacacttcctagccgttagattcacgtattgcaacggtgatctcatcactattagatctaatgtcccccggtctaattgatcaccaccagatttggtaacctcgccattctcgtagaagagcttatcccacggtggtggagatgacatcatatccaacctctgcctttagtctctgatggagagggggcaggcaacgacggggcatggagaagggggaggtagggctcaaagagggaaagcaaggaaggagtgagggggagtaagggagagagggagatgagttatcagctaagatgagtggaagattgagctgcctgattcaacctatcgctagttcatccagttcactatggtttttatataggaaaacgtatgaattacccctttgaactatcacggcagtatgaattaccctcctagaccacaaaaccagacatttttaaccttgaactatctataccggatgaataaccccctttgatcaaatccgtcgtcgaccgccactgcgcgcctcaaccaccgaccgcccaggcgagctctgccttagctgcccatcacccgggcaagcttcgcctccgccgtcaactgactggtcccactactgcaggacagggcatgatccgcctccgcctgcttgagcgcgtacgcgggagagagagagagagagagaggggtatgacaggtgggcccaagggaggtatttttttatttttatttactgactagattgccacgtaggcgcaacgtgtgcaaactcaagtaaaaaccgttcaaaacagtgttaaggggggtaattcgtccggtattaaaagttcagggtgagtaatgtctggtttttgggttcaggggggtaatttgatatcgatcacgatagttcagggggtaattcgtacttttttcttttatatataatgaactggaaataatatttttttatcgattttagatgagcctgtagtgattaactgatttaaattgccttcctataccagtgaatcagtgattcaaagttagaaccggaggtgttaagtactcctacttgaggtatctaaattttacactaaaatttttggtaccttgaggtactttataaaggatggtaaaattaccttaatataaattatgagatccacatacaaaggttttatttcagatgcagaaattccgtgtgattaaatatctgcattacatttgtcagtcgtcacttatcatagtaaacgtgcagacagctctcttttaataattgacatgtttgtacgaatgtgtaacgattgagtcattggcacgacactttatgtagtgtcatgtccgacgagatctgacttgcgagaaagcacacacatacatgcatgtacgaattagcatccagtgctttaatgcttttgcaggttgaaattgtaatagtctttgcttcttaattcctccggtctaaagtataagtttggtcatcattttcatactctcacgcatatggcgatgctcaacttaacacaccacaggggttaaaccaaatcacttggtgacgtcttctttgccgtatttttatctaacaagtagattttggatagtgaaagagagccttttagatcacttaaaagctgttacacttaggttatgaaattgttttctttattccgacgtttgaaagtactccttgtgctattaggtaagaggtttctttttgtccatgtgctagcaagtatatttcttattatcttatatatagcctttgcaacctaggttttaattaagacgatccatggatatatagcacaagtatttccaacccaaaaaatatatagggtttgttcagattggtgccaaaataaaccttaccaaaatttggcaaattggcaacattttcaaaaaaaaattggtatgattggcttaataatattgtcaaaattctatacacattgccaatatttggtaacaaactaaacgtggtcatatgcctatcaattttaccaaataatagtatgattgaaaatgtcatcaatctgaacagcccataagctccctttcattatgcaatggtgtgtgtgaaagatatagcagtagtacgggcacatacgacctgcactagctgcagcctcaattgcaattcagtgctggttaccactaagcaagcacaacacacacatgacagaccagtgaaacaaaggaggaaaaaaagaaggcactattgtgtttggttggccccttcaatgtgggagcttgaccctacctgaatggatctatcaaatcaaaacccttgtgcaaaagagacacatgtaaatgtgcaatgtgtgtcttcccttttcacctccattggttctcagctgagaggcagtacatcatatagagatctttggcagtgcacagtccggacactttagggggacatcatatatacaaagaatgtttggccaccacaaacttcagctttatcttacaaaattcatgcatggttcatttatacaatttttctcattaaaattaatttcactcgttgcaaattctttgattttttgagtagtacctagttttgcaacaaaagaagttattggagaggtattacagtcaagtttgttattctttttctagttgtatatataggttgaatttgaatttttcatgtttgtaggacatatctcatattgatcatcatgcttttttttttttgaaaaaactatgatgatcatttgaatgacacacaaaaaatcccttggagaatgaaaagagtttcccatgccattgctctgaaaatatttcaggccgtagctaataaaaaaaagagtgagaacaataaaaaaagagtgagaacaatctgtgatgatatacatgtatagcactaaaataatatcagcggcaagcatcaatccaagcagaggacataacaagtaaaagagatttgatagcttgcaaacgaagaaaggcactaaaaacctttgcttttccacatcaaggtgaaagcgagatgcatctttatccaactggatactggagaactagtagagactaataactagtggcagcagcagaaagcaccaaacaagcaccccaaccaaacaaggcagaatccacccaccccaaaaacgaatttaaaggaggaaaaaaaataaaggaagctaacgcaacgtagaatctaattagcattgttcctctcactctcaggcacaaatcagattcttccaggagtcaaaggctctctctcaaagctttggctttcggttcacatggtgacatggttcagattcctcgtgtgagccagggaggagtcgacacggcggctgagagcactgagcagaatcgcaactcgctctgccggagattccaagtgccacaccaaagatactatttctctcctagtagtagtgcattctcctgcatggctgcaactatggacggctacccggctctatctttgcctttggtttttctctcgctttctcactgcttgcactagcatattaatttggtgattgatctgaatcagctgcatgcgttggccgtgacgaattcagaaaattgagggtcatacacataccaatggtctaaattgagcaatattgtatttaatgtagcctaaaacaacaacgagaaatggacattctacccggtgtcttgtgcgctaggtagtgtaccaccatgtataaccatgtgtgatgccattgtatatgaagctataaacgatgaaatatagaagtggattaattggagcacgaacagtggagtatattagagggttaggaaattgcacttatttatccgatttttttttcaaactttgtttagcataaatccattatggcgtttgtcgaagctgtgggcgtagaaagttgtccaaaataccattgttgtgttgatgatacgttgaactaggctcttattacgcatattgccatcgattgtcttgtcacaagagtcacaactcacaacacgatgatattttcacaactgttgatctaagcgctagatagaaagggatcgaattctgcagccgtggaggcaattaccacaagttggttgcgtccactgcgcgaaggtccattcagggcacaaaacctcgctttctccggcgtaattattccgtgtaaagcagcagcgcatctcgtggcagacacgcgtagtcgccaagcaatcatcgcgcgaggagaggagaggagaggaaggattgctcacagctcagagatcatatgattggtgatgaaacgaaaccaagctgaggtaaggccttagtgctgaagtgcccgagtgaaaagctggctggaggaacgaactggatatcagaaggtttgtgtttgttcgttggctggctcgatcactcggagctcctgctgcagattgggtcagtagtgaaagtgtgtactatgcatgagatgagtgcgtctttacaggaccctgttctgggaacttgtgacgactaacggcaagaatacctttgtggccatgatgaggatatgaatgcaagggcttcaaggatttgtccatattccataggagctggtacaaaataattgcggtaggtgacatgctatttgcaagatactccctattaacaaagctccgcgttaagacagaatcagcacatgtgtattttgcatcaagtagacgcacaagcatattacaggctgttaaggtgataaggtcccaactaaaacatgttattcagcactcgagatgcaagaacaccttatgtacaaaagcacaacgggatcaacgtgccccacttaagctccgagcctccgaccaatgcaaccatcaagtcattagctgatcagaagacatctttccttcctccattgtcagtgatgcactaggttatattgagtgctagtcattaatcttttcgtaaacttgtttttacttcatgtcaaccacctttccataagcctgttttacctcttcaagattttcagttaatcctcataagaaagggattgaagagaattgaggggaattaattccacactagatgtataataaatccccttcaaaaacaaggctttaggcagttagaagaaaacccttcaaaacaatcgtcctatcaaaaaccttaggacaagtagcattcatcgtctccttccataactatggtagaaaccaccagcaatgtggtgccgctgccgacctcctctgatcgaaccatcccaaatgccccgtccacctgatctgatactgctgccggtgttgcttcctccttgaccccaatttcccatctgtgacgatccaccattcatttcttcttcctccctttcattgtattccaggatcctgcgcttaatactctgcttctcctcaagctcagcagcctcttgctgctttgtgctttgcacaagtgagcagtcaccaggaacgaacatctgttttgtttgctgcttgtgccctttcttcattagcaccttaacacgcaccttgctgccacccccagcactaccaccctcttcatccacagtttcttctccactctcggactcgacagcccttgggtccttagaaccctcaaggacattcattggtaccatcatgttcaaagtggccctgggccgtacctctgatttacgtgactccaagctctcctgaagaagggctttcagctcccgatcaaagtcttctagctccttaggatcaacttgcacgactttatgtctaacctcaacaccttcatcttcatcagaaccagcaggaatgccatcatcctcatcatcaccttcattctcagatgcgtcatttgatttatcctcgaacataagatcttcctcgtcttcatgaccatcaatgctgccactatctgaataactttcactgtcagctccttcatgatccttgccattttcctcggctccatttgctgagctcctgccgttagcagaaaaggcagtatcatgtggctgcaccttctgagattcgctgtctgagagcttttcattttcaggcttctcaactgaggctgcacgctcactttcttcgagctcaagtaatgcagcatccagttcttctactgatgaatacctagccatgttgggtcttagctcagcaaacaaatcctgcaagaacacatggcaaaatatattttcggcatcatcaatgtaatgaacgccaacaaaaaaaatcaagtaatcataagccatatatctacagctccagtagagagtaatatattccaaaattcaaatgcatgaaactaatcctgtcgatttccttttgactcgttgtacaaacataataacaatggtaggattaagcacaaaacataacaatattgactggttacgaagttacaatgttctaagatatttcattgtttcacttgtaaagtacgtagtttttgcacagtgaccctacagaagtcaaggctcaagacaagatactccttgttctattttactgtttaatgtttcttgttagcaagaaaagtattgttgacttagcttctcctatttagcaaaacaaacaggtcgataggagtaaaacccaattttcttttctattctggtccccctagtttctcaagaaaagaaaggattacaggtccatttgcttaccaaatttcataatgctatttttttgtaaagttcatttggttacaaaccaaatacccatatttggcaatacccgaatatcaacatgcctcagaaatatgatgaagtaatcaatagaaagcttatgcagtcatttgacccatcttgttgggttttttcccctcataagttcataaccagaatccgaaaccactagataactattcttggctacaaacaacagcagtttgactgcacacatatgacactcgtgttttttttacttagtaacccagcatctctaatggagaagtttcacaaagtatatatgcatgttgggttgtcatcaggctgttcacatgataaagagtactaaaatgtacttatgaacattggcaaggtgtataatgagaaaaactaacctgaacgtcaaattctatgtcaagtggtaagggccctttactaataatatatctttgaaaatgcagcaagaacttgtcaagctttctttttgaagagcctctgttgaaatagtggccacaagtctgcagaagtgtaatgattaacctgatcctgaagcaatcttctggtggatccaacacatcttgctgggataaaaaaaaaagaagattactcaactgaatacaatgacagaaagatttgttagatctttcttaaaatcagcttgcaataagtattaaaaaggacatgagtaagaagatcaatgttaatgccacaaaatccaggcttttcactctaagaaatatgctgatgttctgtataatttggagtgtgtaatatgcacacaaatacagcaaacaagttacataacactaaagccaggcacagcatgattaacttttgatgaagttgctcttgtgttgtactgagcaaagagaaaggatcagagcacgaaacaatgttctagtatagcaatttaattgtttcaaaacagcaatcttagagccatgtggttttcttttttgaaaattacagagtctgagcctgcatctgaacatatcaacagaaataaggaatagtgccataaagttaaatgaagatataaaaaagtttccaatctttgctaaaggatatactcgtttacctcaggagttccatgaccaaatacgatgataaggtacagagtctcgaatacaactgatgaatcaatatgcttgtagctgtatagctctccaaggaatctcatgtgggcgagacgcctttgttgcattccatagtcattcagctccagccctacccttgtctcctctaaaacctgaattgaaatagagaataaagtaaaccacttggacatgatccacaaaaaaactgaaaactgccactttgttacaatttatttctactagctgacttgcaaaaaagagagcttgtggatagaattttggtggcgtagctatttctcaaacattccaaacacaaagattttgttcagaaacaaaggtaaattattacaatcagacatgcccctttggatcaaaaacaacatgagctaataccttgaacaaaggaactaacctcatctaccactgaaacagcaaagtcatcatgatggcgactaagaccagcagttagaagggcaatcagatgaacatggctgtattttcccttgtgaacctttagaaaacactttataaggtattgttggcactccacccaaggtagcttgcgtaattggcgaagaacatgttcaacacttgatttatcaagatcggagaaaagcaatttccgtatgtactgcagaggaagaaaaagacgatgaaataatcactactacactatactctgtagataaattcagtgaaaataatcaaagaaacgatcaaagaagacagaaattttacttgatgcagaggtggccgaacttttgaaactcgagcagatctttcaggtggtttacaaaggtaataggcattttctacaagtgtactgtggcggggatccaaattcttcacatttttcaatcgcatcagtatctccaacatgttagccatacgaatagtagtttcaggtgaacgatacaaaaaacgtccacaagtctcgagtagattgcaggccacatcaatgttatgatgactgaaatcatctaggcaggactgcaaaatatgtaagatatgagtacacaaagcaagtggaaatgcagcagagctataaagttccaaatcaatgcacaagatatgaataccttcaagcagctaaaaacaagagctgcaggtgcaattttgaatttgcacaactccccaataaacctaatgttttttatttttgtttcaatgttgatctgatcctgaaaaaataacaaaacagcgaggaatagttagtcacggtaactatcaaaggggagaaaagaaaatcttgcgtcccttaaacttaacatttcctagtctgtttggattatatgtggggaagatgcagaacatctggtccatgattgtctttgcttacattgatgttaatagcctaatatagatcggagagctaatgatatatagtccctccattattaaatatatattgttttagaattcatgcagacaaaccttgaaatcttaagtcactcgcatatgctataataatataaagatttcatatgtgaactatgtcattagtaaatgtcatgattttttaaacatagttattgttttacaatgagtatacgattagagaaggcgatgatcaaacatgtacattagagactgtaacaatgtcctaaacaataagtaaaagaaaacagagggcataccagatatcacaaaagaaaaaaacaagaattttctttcgaaaaataataaaagaagaatctttttgagaaggaacatgaaatgagcacaaataatgcaaagggaagaaaatagttaatgtcagcataccttcttatttattaagaagttgaactcctcttcaagcatagaaagaagcatacttggaacatctttcatacatgttgaaagtgtagccaccaaccgagaatagtaaggcaaaagttccagtgaagtccttggaacattgaataacgtccgcacgagtttctttcgacttgctttagaatttaggtagcaaaactcaacctggaaccaaaagtaagttatgaatgataattggtgttaaacatgaagtggatcgataatacaatttgagttaataccgtcaattggtcaataagatcacggctaacacatcctggcagcctctgaaggaggttgtctaaacttgcaccatccacagctcttattttctccttctctctttcagtttttctgtcaaaatccttctctttagatttttccttgtctacaccttttcccttatctttatctttttcttcactatccttcactccatcatctgcctttccttccagatgatattcagtgatggaagaagtttgaggattgtcatgtacgtcagtatcttgttctgcgacgggttccttcaaaagaacatgcaacaatggtttagggcaggacatgacacaatgacatacaaaagggaaatgatacaaaaaaaagtaagaaaatgcacatttaaaaaagcaatgaacacattccatcttctctcttttcctctcccaatccacaaacatacaacaaggacacagaaacaatcttgtgtataagatatgaaaatgtattggaacactttatcaatcaaaattgtaaacaaggaaatggaaagcattcattggatcatgctctgtcaaacatctccatataacatcacatatttgattaacatcaattgggaattaaaacactgcacaaatatttagcttgaatcaatctacatacactatttgaatttaaacagaatcgtcagccatatctaagagactgaaaaggtctgaactttgatacacagaagaaatgagcaaaatggagatactctggatgcctcgtgccactaaaaaagagtacccaaggaaacataagtgacaaccaaattgtcatgcagtgatatattgatatctaaaaaaccagtttacacagaaaaaaagtactaagtttggagacattgtgttcttacagattgttcacgacccttctcattcaactttggttcagcctctcccaataacacagcgggcacaaatgctctgctcgaaattaaggcatataggttaatgtagttccacaacaactaactagtgagagaagataacagtgaagatatgaagggaaacctgagatcaggtaaagattcataaaaagcttttgtatcctcatcatcccaaataggttccagtgcagacggttcttttgcagtagacggggctacatcacttcctgtagtaactctagttgtgtttccatcatctggcatcacggggggctgcatgtcaagagcttcagctaacctgcaaaagaaaggttaaagattggcaaaaaccacacacaaaatacatgcaactagatgataatgttaacatcatcaaaagataagtgccaacagttagtcaacacatggcaaaatagttatatttatctaccaaaatttaatggcattgaacagtaacactacaaagatcacgtgttggaaattaacattgatgtatcactgaatgtggacactggtcccaacttgccatcctcacattggatgcaaaatttacaatttaaccatttgcaatgtcattgagcagatctttttccccagaatgtgcggctgtgaattaactaaatatctgtggtcttttgcaatcacaaacatgaaaacatattataggataaaataggtagaaagatgtcttctatatcactttgtaaatcttttgcttagtaggaaggaaacaatgttttgaagttcgatcaaaacagtaaaattcgatttacatgatcaaaaggaaatcctctaagttacatattgtttttatactgaaatttgagaagggccaggaatgtctggtacatgttgtatcccagctgcacttaggcatggtatactcctcattcatgtgtatgtatattcatatgataaactatgttacagtgtgtgtggtacagaagaacaccatgattgcattgtaataaagataacaaattagaggaaattaaaatggtaaattccagggcagcacatgtcctgcaatactatgcaactataagctccctaacagaagaccagatgcgagaactggataaatggtagcttatgctgttacggaaccatatacaaataaattaaagataacactctcaaatgtatactcacgaggatacaccacgttgtaaatgatcaaaagacttccggagtttttcatacgaagcagtgttctcgtcgcttagttcacctttggcagttaaaacttttgcattctctgcctccatcagacgaagagactggggatagtgcatagttgggacgtattcataaaagatatcagaggaaagtaaaaaaaatgatgacaaaagaaggcaaaactagtatatataagagagcagttaccgcatgttctgattggagtagttcagctacagcatcataataagtgttcaaggctttcttgaagaactttttctgatcagccgtaacatttagatccttaaataactgtaccaattcagaatttgtgcggtcagatactcagcgcaatagtatggatactataatgcatggacaagagtttgttcgaatcattcaaacatatgagtcttctgaacaatgtgctagctggtatatgtattccagaatgctgtattggtagaatccttaggataacacagcttagcataaggtggggaagtagccaggtaggatcattttatacatacagatccttcccatgcttaagcccttgggcacaacgagtcaattatagcctaggcacttcctgaattgaagttccccaccattttctttttataataacaaaattaaaccttatgggtctatctatccttagtggtgaactagccaaattcgatattttatacatttctaaaagctgaaaaatgtatgtgcacatattcagaaacaaaaccagttgaatgatttccgttcaacaagtaaagagtagatctctcttcctaatgaagtctcatgatttaataagtatgcttaaatttctcttacctcatcataagcttcttgaccatgagactgtaaccctatgaaaaatctcccttgacgagcaaaggcagaaagaagagacaaatttgcctgagttgtttcccggtccttcaagtgttctaatgatgtaagatcttttataatgtttacaaatatactagcatcttcaacaatcccaacaaaatacagttcaattagaagtttcagtgtgcttctcttcttcatagctcttgagtttttgtctgcgtccaaatcttctccagatttcccaggaaagaatacctttagtagcccttgtgtaagacaaggagagaaatccttgtatctttgatgaagtaaggagcaaacctaaattacattgacacaatagttattatattacacaattccagatagaagtgacacttttggaagttcaagtctttatcaaagaaaactcaaaacaagcaaattgcagtaaagcatgatgcaataagtccaaataataactgaaatacatgtaacagcacatgtaaagagcatcactaggcaatggaaaatgcttcattatgcaacctagaaactaaatagtcaattgcattgaacaaaagaccttgctcaagtacaggtcggatggttccttatataggcacttttgcaaacacactaagaccacacaagttattcgaactcaattacctgaacagcagcttgtatatcagcagaacgaagtttggcctcacaaatataagaaactgcctcgctgacaaatttgctcaagttcacacttttcaactcatccatcaatccatccttctgttcatcatttattgttttgagtttctttataactgttgtatttcgcttaatactggagtcaagagtcctcaagtaatttgcatctgaaattagagaatcaccatatcataatagtgctagaaaaatgtggttatgacttatcaccattagaaattatctaatcaagaactcaaacatttttctgactgaatataactcaaaatttcattaacctcaacggcataaatattaaccatccattccaacgcaagagaaccaaggattacgagagtggtaaatttgagtaaaaaagacaaacaatgaattaaaatgaagtcattgagtagcttttgaggttattttcgtagctaagactccaaaatcactacaaaaattcctcatccacaacaatctcactttagcaaaaaattataaatattcaaattagtcactaatattcaccatgaccactatgaagtcattatactgaatgcaacttagtaccaggcctttcagagtttaggttgctccggcggagggcagtcttttgatcaacaagttttttgtattcttcaagacgagcctcctgcatacagccaaaatttaggatcagtgagcagaatttctgaagtcacgtcactagaaagtgcagacgaccaattgtacagggtagtttacaaattatcaatcttcaactagatctgccacagttctagaaacagcaaacgagtccatttcacaggcaatcaagagtacactttttacgcaaatacctcaagttaaagaaactagaactgaattggttgtaagggagttttcttgtgtgttgagtactaatataaccagaacagttttgtttgtaaagctaagtcaaatatgtgttgcagattcataatttctgctggtaacttcagttgttaagttgcgagattcagattcacagtaaacaagtataatgtggttcaatgcgtcagaaccatgctgtgttatgcccccatgtaatcaaagtatctctggctatcatggtgaaaaatgggaagcaaaaaacccaaccattataataatgacaaattatggacatcaacctgctcccttattgaattgcagccaacatccattgattttgtcaatgaaaaagtatcgtgctaaaatgagattaagcaaaattgcctgtttcagattgttactaaaggcacaccagaattacctcatcatcttgcttgttttggcgggtctcgtcatcttgcttggcttccttgctgttctcattctgagtgttctccattttattttacaaaaagtagaaaccagatatacacagtggaaagctgcaaaactagaaaagagaagaggaatgtttcacgttttagaaactagtagttcactgcaagtctgcaactgcaaattatttgcaaaatacagctaaatgcaacatccctgacaaacagcacaataagatatgcacgacatatgtgcatctcacgttaatgacaaagccataaaggccattatttagagattcacgctgatcactagagatctgtagtgctcaaagtacccaaacatacagaacttactgcagggcaactaatccctaccaccacacacacctaccccccgcgggccgcagagactgaattaaagtggatagtttctcccaattgcaaataaaaccgacaggaatcgaatcgctaggtttgaacgcatcaaaaccaaaaacccctagggatcgaactaagcgtgtgaaactactccctagttggcagcggcaccgcaggggtgtcccgaagcgggcggagaccgagaggacggtagggcgggcgcgccacaattcgcgccgccgccgccgccgccgccgccgtctcggcccggaagcccgagagagccccggcgcacggcgcacgggaggggaacgtgggggaagcaggggcacgtacctgcaggagagggcgcggcggtcgccggagacgagcgcgtggctggggagacgccgcgctttctcggtcggaggccggcacgaagggggaggttgcgggcgaggaggagaggggtgtggactcccggtgggagggcgcaggggaagaaaggggagcacgggaggggagaagcaggaggatctctctccttaaatgggcctaacccgtgaaaattggcccggcaatgacttcgcacgtgcgcggcccaatattagggacggacgcgggggagtgggagataaatgggccgaaagacggcctgactaagggggacaattacaatgcggaatacccatcggcctagcctaattagatggtgtttgaaactgatgaagaacgaaaaagctattattggcacataattaattaaattttgattattacaaacttaataaatttatataattgatattttaaagaaatttctatatataaaattttcgtatagaacacattgtttagtaatttcgccttgcagtaaaatgtgagaatgggccagattcaccggatccactgcatataaagtcctacgaactgaagaaaatggtacttcttcgaatatctaccaatctgctttgggagaaaatcaggtacagtacttccttccaaaacaatgtgataaaaagatccagcggagcatacttttgcaatgcattgctatgcaggagtacaaatttcaagataataagtaataaattcggatgcattcttgaaaaggaagtgtggtgctgcggtgcagtataaaggaataagattactttgactccctcaactgaccaccgaatctaaatcgtatccctcaaccgcaataccagaaatctcgaccccccgaacttgcaaaaccggtgtaatttaactccctcgccggttttgggaggtggtttcgctgacgtggcgccacgtggcgtctatgtggcgatattaaccgagtcttcggtccacgtggcgttaacgtggcaattacgtggcattagaattacaaaatatgcgtgggacccattagtcattggcacaaaaagaaatgtgggcccactgatatgtggggcccacatgtcagtcctcttcctcctccctatctcccttctctctctttctctccccttcttcccattcggccgacaggcaggagggcggcgagagcgagcgggcggcatcggggcgcatcagaaccgaactgggggcagcggtcggcggctaggacggcggcggctcggcggcggcgacggcgaggggaacggcggcggcgactcgcggcagtgggagggcgaggggaacggcggcggcgactcgcggcagtgggagggcgagcggaacggcggcagcccacactgccgctcgtcatcctcgtccttgcggttaccggcgtgatctctgatggcttgtggggtcgtcgtcggtgacgaagcgactggcgcggggggtgatgaaaaggccgctggagaaggccggggcggcggggctggagaaggccggggcgtcgtcctgctcgtgtgcgccgatggccgccgccgctcccctcgtccgtgcgccgttgcgatcgtcgatggaccccggtggtgcgccgccgcctccccaccgaggccgagccgggctggccgcttgctcttgccgccctcccgcccgccgtcgaatgggaagaaggggagagattgagagaaagagagagaagggagagagggaggaggaagaggactgacatgtgggtcccacatgtcagtgggcccacatttctttttgtgtgaatgactaatgggtcccacgcattttttaattctactgccacgtaagtgccacgtcaatgccacgtggaccgaagactcggtcaatatcaccacataggcgccacatggcgctacatcggcgaaaccacctcccaaaaccggtgagggagtcaaattgcaccggttttgcaagttcagggggtcgagatttctagtattgcgattgagggatacgatttagattcggtggtcagttgagggagtcaaagtgatcttattccgagtataaatgaacctgccactacgaagtgtagcggcaaataaacagtagcggattcgccaatcgacatcatcaaacttactccctctgtcctaaaaagacttaataatgctttttttatgattagtattttcattattgttagatgataaaacattaataatactttatgcataacttatctttttaatttttttcataactttttcaaataagacgaacacgttagatacggacctaacagaaacccaggaattgagttttttttagaacggagggagtattaaatgtcctgaagaacaaaatccaggttgcatttggcaagtacgctgccgaatcccaatccccagctggccgatggttttatgaacttgaaatggcaggaattaatggaccgtatcaccacagcggatgagccagccagaattaccagaacttgttgctactatctactgtacattactgcgacgacatgggcacatcgcacatggctctgcaagccccgagtctgtactggaacgagaacgatatcgccggatacgctttgcacaagaacaccaacggcctgtgacggggacaagatccccccagggctcccaccgtacgcgcgacgtattgcatacgctcatcgatacacgtacacacacatcacaaacgggacttgactgacaggaaaatatttaggctcaagttaggaactccattgtcaccgcctttaaattaacttcaagaaactgaaagcaacaaaaaggagaaaaaaaaagagagaaacagagaccatatgctctgttcaatagttcagtagttccctctgtcttaatactagcttgcaacaagttacacaaagacaagaagacgaccccaacgagaaaaaaaatggagaattcattcgtcaagtgatcaaggcagggttgcaccgtttctcctgctctttcaaaagtctccgaaacaaacaatgcgtccgccgccgtgcgtgactgcgccgccggctggccggtgagtcggcagcggcggcggcgaggctcatggtagcacgcggctgaagagccgcgacacgtcggatggccggacgggcttcaccaagaaatcctccgcgccttcctcaaggcatctggttaataaaccaatcgaacagagcaaagatggaagaacaatggttaagtgctcggtaatctgtatggataagacataagaatgctctaatcaatagagatattataaacggataaaaatacctgctgattcttgttggcacattctccgaggacatgatcaccacggggatcttcttcagcttggatgactcctgcatgcatatacgattcatgattttgcgtcgtcagattgattctcctgttaatcaaagtaattaagctttctgcaggacaatctaagatcatgcatgtataccttgactttcttcaggagctcgtatcccgtcatctccggcatccagtagtccgtgattatcatgctcacatttggttcctgcaagatgatgagcgagccaaaggaacatgagaaaattgcggctgcatatcaccgcaacctgacatgcaaaacaaggccaaaagttcaggaaaaaaacaaaggcgtaccgagcctagcagttccagggccctcttcccgctatccacagccgtcactgcaccagaaaaacgtccaaaacaacattttcaacagcagcaaccacaaacagaacaaaaaacaaaactgatatgcatcaaccacacatgtaccacgaaaccgggagctccggaggatgccggcgatgacggcgcggtcgaccgagctgtcgtccacggcgaggacgtgcggcggcgccccgccgcccaccgccaccgccgccacggccgcccccaccacggctcctcctgcgccggcgccgatcgacgacatctcaacttctcaacctctcctacgtgctctctctctctctctctcgcagactctcgtgggatcgatcgatacgctgagcaagcgcgccgcacaaaacctcacatccatcaccaccacggtggggcgtctatatatatacacaggtggctgtagttgccggtgaggtcaccatgcagtttaggagaggaaaaaaaaatggaagtacaaggtgtcgcgagattctgcaggcgcagctgtgcagtgcagagatcgatcgattgatcgaatccacgggatttggatacggaacggcgcacacgtgccgcgatcgcgctgtacgcgcggcgaatcggcgatcttttgttgctgcaaacggaggagccaaagggggtcaggtatttactcctcctcctcatccctccccccctgcgtgcctgtcacagccaaggaccgagatcttgtcccttaaggccttgttcttttaggctgggtttgggggggaatggcctgaaatccccgtgtgccatcccggccgggtgtaattttcttccgtgggccatatacgcgttcgcctgggccggggtgggggcaattctccgcccgatccacgccaaacccccgggtaaagaaaaatcatctccgagacgatttttttttccccgagcagagacagcgctcgtcttcctcgactcccatggcgctagggtttggaggcggcgcgaggtccgggaggcggctctagggcagagatctaggagtagcatatctccagcagccgccgccccccatcccgccctcggtcgccgccggtcttcatcccgcttcagtcgccgccggtctccatcccgtcctcggccgccgactgtgtccatcccgccctcggtcgccgccggtctccatcccgcttcagccgccgccgctctccttcccgctctccatcccgccctcagtcaccgctgcttgccatctctccttctcgcttcggattcaccgattgcgggagatggcaaggtcgaggacaatagcctggacatcaagaagcaggtctgattcttgatctccttttttcccactctgaaaagatttgtgacttatctagtggatggatttgttgctagttgatgtatggagtggttgtatggattaaggaattatgttgagaattaaggttgatagggaatgcagcaagagaaatagtaggcagctgatgatatatattgtgctctctatagaaatgttcagccgatttagtgatccttagtatataattttgcaaactttcagtttacaagaatgctcagaggacaaagtcaattgacaatgctgaagatgaatacttgtagaataccatgagtgcttaaaatgtcacgtttgagtaatcaaatgtatctttcctggaatattcacaatattttctttacagttagtatatatctttcccatgtattctgcaaggatttcatttatttgatattttttatggctcactttatcaggacaaagctgtgaatcgaaggaaaattgcagagtttaagtcgttagggcttgaggcagttgagaagaagaattatctttctgcagcaggatttacagtgaggtataatagagcacaataatttccactgtgtttctcttttccaaattatattgtagtggtttgtgtagctttctacatgaggcagtcaagcttctcaatgatttcactacccgtacatttttcatgaatgcaaacataccctgcaattttgcaaactttcactttataagaatgctgaggacaaagttaattctctgcaaaaatttagcttcacttcttcagtagatcataccctgttattgatattttttttaggtaatctttctccatggctttttgtttagcaaaatttgttaaaacttgagaaatgtagctgtccataacaaggtatataaggctcccacagtttatcattacactattgtcacaccccgaagttttcctcccaagtcaaaattgtaatttataattgaccctaagaaaatgctggtgaaatcaggagaaaaccctaagaaagtaatgcaaataataatcggatctgacatgtggaatttttcttgaattctacatgtcgaaattcattaacaggatttttagtggaattttcagagctctagaaataattttaaccaattaaaaatcactaaagtgcaattgttaattccagggaaaatcctttttccttttctttttctttttcctctcttttccctcctttttgtcaagtgggccgtcggcccacttctcccttccttcccctcccttactgggccggccgcaggccgaggcccagcccgacagccggccgcccgcctccctcctctcggggtcgccgacaggtggggcccacctgtcggacccgtctccctcctcccgccgatcccgctcgcgccgccaccgccgcaaccgacgccgcgcccacgcctccgtctctcccgggccacgtcgaccacgcccgcgcgtgcgccgcattccccgcgcccgttcccctccctctcccgctcgcgcccgcgcccgagatggccgggattcgaaaaccgaatcccgcctctctctcctccccactcccccgcgtcggccggcgattcccgccgctcccggccacgtccggttccctctccccctatttaagcatcgccggcaccccctctcgctttttccccatttcgccgacctctcccgagctccccatcgctcccgcgccgtgcaaccacccgccgccgccgcttttgctactccggccgccgctagccgccgctaggctcgccgccgtctcacgccgtcgccgccattagcttcgcgcggccgaggtccacctcgtccacccctcctccgtcgaggttcgtcgccggaaccctcatctccacgcgcacgggtgagcgccacctctaccgccgccttcggccatggatcccgatcgccatggtccatctctctctctctaatccctatcttctccttccttagggcacgccgaagctcgtccgctagccgacgccgtcctcccgtggcttgccgtcgccgtccgccatcgccttcctccgcgccggccaccctcggtgaggcatcccctcccttcttttccccttcctctcctctagccgccgctctccgccgccgtcggtcgtcgctttgcgccgctgccgcatgtgcgccgccgccgtgtgagcgccgcgccgccggcgccatggtcgccgccgtctcgcgccgcgcccgcgcgccccggccgcgaggtcccgcgccgccgtccgatctacccttgggtagatcggggccgtcggtccggtcgccacgtggcgccgccgccccatccttttcccgtgccgctgaccggtgggcccgcaagccgccaccctctttctctctctcccggtcgctgaccggtgggccccgcctgtcggcgccgcgccccctcgctgacgtcagccctggttaatattgcgcaataaattatttaaggatttcttttatagtaataaacacagtgaatcttctaaaattcataactaaatcatccgagctccgtttaagcccattcaagtctcagtaaatcaagaaaaatgtgtagaatccattaaaaatggttttgttctctgtttcagtagtcttatagcctgtttgcaatgtttgctttgtatgtcgctagattccggttctttcgacgctccggtgtacttcgaaatagtcgccgaggtacctccagcagcagagcaaggcaagtcatgcttgtcacttgaacatgttgatcctatattgcaaatgctccattgttttctttcaaatattgcactgttttataatatcactatgggatggatacctattgttacagccatgcttttggatatcatgctcctttgttagcttgggttataacatgattagactttggactaggacttgcttagccatgcttagttcaactagcacacattggggatctcatttaaaacctagactataggtttatatgataatgttggtttaataccaccgctctggtgttggttaaataaaatgaaccacatggtgggctgtgggtgcatggttttgctagtcgcacccatggcagttaaggaccggttcgcgggatgccctggaagaatttatcgtacttaccacaagccagcgtgggcaacggctgggcttgtagtgtagctttcctctagccgacgcatccaggcaagggtgggcgtgatggagtttggatgggccctgcgacggtctatgcggcttccggattcacctaggcacgagaggggactgcccgctgccttgcgaggagtgggggtgaaacctgaggtgtggtgtgcttggttagagggggttatgcgaagggtcctgtcacggcctctttccggtatgtcgtggtgacatgtcggcgcacggaaacgtgtcgtggggctgtgtcttgtgggtacagttgtacacctctgatcagagtaaaactattcgaatagccgtgcccgcggttatgggcggtcaaccagattcaccgtgattagtctcaccctagtgtaatctgttgaatttggatagtttaggtggatggttgggcctgtcgcaacgtgggttagcgttggacagcggatgtttaatactgtttaatttttacaactgttttcgcattaaattcctgtttataaatgccagtatttatgcaaatgaacctgcttagctatcccttgttaaatccatgcatcatacccctattccggtatgacttgctgagtacagtgggtagtactcagtcttgctctacttttccccccaacctcagagctcgagtatgtgtccgatggcgggttctccgaggagtaggcttcgtccgtgccgtcgaggatgcctgtggagtggtgttcccgctgccgttcaagtcaaggcttagctccagttatcttttgttttccgctgcatttctgtaagattttacaatgtttgtaagacgtggatctgtatgtcaacattgtcgtttgtgtaccccggctggtcctggacggggattttaatgcacattctgcttggaattctattcgggaatttctgggcgtgacaagttggtatcagaaccgaccttgaccgtagggcaagccaaatggaaaaacctaagagccctctgaatcctttttcattgcatatgttcttcgcaattggatttgttccgggaaaatggggatctgttcttgtggttcaagggaaaaatcttggtcgctcgtttaaagtgagtttttcaaaacgagtcagtctagggttttagtaaaattattgggatttattcgtcagtcagttgggatttgatgggtgaaatgcattcggtcctagctcggtatcatgggttgcaaggtatttatgctttgttcgttattattattatgtatctaatttcccattattttatcgttatgtgagtctgtcttatttattcgcgctcatgtaaaatgatctatgcataaaattttgctcttatttgattcctttatttgagtctttattgctttatttaaatttggatttgagcatgcattgatcctactcctttgtcttctctagatggccggtcacccacccaaccaccgcggagaaggcatgatcgactttgtggcagagctggcacgcatgacactggtagtgggctaccccgacgcgccggagtacacgaccatcccaccgctcagtggcgagcttccttaccgtgtccgcttggaggtccatggctacgtggggacttgcctcgctaacatggcggtggaggcgtcaggaggcacagcagatcacgcctgtcaggaggcagcctacttgatgatggccaggctacgggagcgccacgactacatcttccacgacacggcgtaccgctaccacccccgtcgagcccatggtgatggcgtcagctccttccgtccgacagctggcgagaacgacaccaccttcggtcacatgtgtgctgtgatgaggggattggataggatgcactcggacctgcacaaggcgaccaaggccttgaacgatgggaagctcatgaggatcgtcgctctgaaggacgaggtagcgcgcctgaagaaggagaatgctcagttgaagggccttccagcgccaggaggagtccggatccgcactacgccccgtaagaggacgactgcacctgtgcgcatccagcttgcgcccaggaacccacctccaccagcagctcccgcagcagctccagttccgcccgcagttcctgcagctccagctccagctcccgcgttcactctctccttcgctccagcatcagccgccagaggttcagccagtggtaccggaggttggctgtctgctactcccagcggcagcggcgagaccgatccgtcaggctccaggagtcgcttagagggaccgggtgacgagcaggaggacgccttcgactccaccgaccgcaggagccgttccgagcattaggctcgtttttccactagttcatcgactgtctagtttttgtttgttagtttgtgtgtgtaggttgcttgtttggggtcagacgacggtcgatatcatgtgcctatgatatggctgtcttaataaggatttttgcttgcctttttaagtgttttaattcagatcagaacaattacagttttaattcctttgtaataaagcttagttcttgagcatctgtttttcttcttttccccgtctgctcttccctccagatggtctacaccaggactggtagccgcgcaacaggcgagggcagcaacggcgaagaacgcgctgatggtgtgcaccccaacggtgattctggcaatggtccgccaccacttcccgagaatccgacgcttgcccaagttatggcacatcagactcagatgatggcagccatgatgcagcagatgcatcagaggatgatgcagcacgccgaacagcagcaccagcagttggtccccctcccccccagtccaagttgcctgagtttctacgtgtcaggccacccaccttctccagcaccaccaaccctatggaggcaaatgactggctccatgcgatagagaagaagctgaatctcctgcagtgcaatgaccaggagaaggtcgctttcgccacacaccagcttcagggtcctgcgtcagcttggtgggacaaccacatggccacccgcccaccgggtactgaagtcacatgggcagagttctgccgtagcttcaggaaggcacaggtgccagatggggtcgtggcacaaaagaagagggaattccgtgcgctccatcagggcaacaggactgtgacagagtacctccatgagttcaatcgcctcgcgcgatatgcaccagaggatgtccgcaccgacgccgagaagcaggagaagttcatggcgggtctggatgatgagctgaccaaccaactgatatctggggactacgccgactttgagaggctggttgacaaggcaatccgccaggaggatcagcgcaacaaaatggacaggaaaagaaaggcggcgcagttccggtccaaccaaggcagtcagcaccgaccgcgcttcactcccggacagcagggtggacctaccaccatgatcgtccgccagcaccgcccgttcaactccagcaacttccaccagggcactagtggcagtcagaaccaccagggaggccagcccaaccgcggtgcagctccacgcccaccaatggcaccggcacagtcagcccagcccgcgcaagccaagaaggagacgggagcaaaaccagggtcctgcttcaactgtggcgagcttggccacttcgctgacaaatgcccgaagcccaggcgtgccgggccaaggtttatccaggctcgtgtcaaccacgcgtctgcggaggaggcacaagcagcaccagaggtcgtactgggtacgttccctgttaactcaatccctgcaacagtactttttgattctggtgcaacgcattctttcatttcaaagaaattcgtgggaatgtatgggctaaggaaagaagagcttagcacaccaatgagggttcgtaccccgggaaatagttcaacctcagtcagttttagcccttcagtgctaatagaaatccaaagatcaccatttctagccaacctcatccttctcgaatccaaagacctagatgtcattcttgggatggattggctgaccaagtttaagggagtcatcgattgtgcgaatcgcacagtcaccctgaccaatgagaaaggagaaaccgtggtgtacaaatccctagtctcgccaaagaaaggagcctcgttgaatcagattgaaacggaaatcccagtggacaccgtggggaagaacttgagaaaattggaagatatacccatagtctgcgagtatccggaagtgttccccgaaaacctcactaccatgccacccaagagggagattgaattccggattgacttggcaccgggaaccgctccaatttacaagagaccatacaggatggcggccaacgaattagcagaggtcaagaagcaagttgatgagcagctgcagaaagggtacatacgaccaagcacttcaccttggggcgctccggtcatttttgtggagaaaaaggataagacgaagaggatgtgcgtcgattatcgcgcacttaacgaggtcacaatcaagaataaatatcccttaccgcgaatcgacgatttatttgatcaactgaaaggagctaaagtgttctctaagatagacctgcgatcaggctaccaccagctgagaatccgggaagaggatattccgaagacggccttcaccactcggtacgggctatatgagtgcacggttatgtctttcggacttaccaacgcacccgcattcttcatgaatctgatgaacaaagtgttcatgaaatttctggacaagtttgttgtggtattcatcgacgacattcttatctattcaaagtccgaggaagaacatgaacaacatctccgtctggtactcgagaagttgaaggagcaccagctatacgccaagttcagcaagtgtgacttctggttgacggaagtcaaatttctgggccatgtcattacagcccagggtgtagcagttgatccatcgaacgtggagtcagttacaaaatggaccccaccaaagaccgtgtcgcagattcggagttttctaggactggcaggttattaccgccgattcatcgaaaacttctccagaatcgcccgacccatgactcagttgcttaagaaggatgagaagtttaaatggacagctgagtgcgataagagctttgaggagctcaaaaagaaattagtatccgcaccagtattgattctgcccgacccgacgaaagacttccaagtctattgtaatgcatcccgtcacggacttggatgtgtcctaatgcaagagggcagagtggttgcgtatgcctcgcggcagttgcgtccacacgaaggaaattatccaactcatgacttggaattggcagcagtggttcatgctttgaagatctggaggcattatctgattggaaaccgctgcgaagtatatacggaccataagagtctgaaatacatcttcacccaaccggatctaaaccttcgacaacgaagatggttggaactaatcaaagactatgacatgagtattcactaccacccgggtaaagccaatgtggtggcagacgctttaagccggaaaagttactgcactgccctatgcatcgagggcatgtgtgaggaactgcggcaggaatttgaacatctcaacatgggaattgttgaacacgggtttgtagccgctttggaggcacggcctacgctcgtggatcaagtcagagccgctcaagtaaatgatccggaaatagcagaattgaaaaagaacatgagagtcggaaaggctcgggatttccttgaggatgagcatggcacaatctggatgggagaaagattgtgcgtaccggacgacaaggaattgaaggatctgatactcaccgaagctcatcagacccagtactccattcatccaggcagcactaaaatgtatcaagacctcaaagaaaagttttggtgggtcagcatgaggagagaaatagctgaattcgtcgcactctgcgatgtttgccaacgagtgaaagcagagcaccaaagaccagcaggtttactccaacctctccaaatcccggaatggaaatgggaggagattggaatggactttatcacaggactgccccggacatcatcgggacatgattcaatctgggtagtcgtggatcgactcaccaaggtggctcactttataccagtacataccacctatacgggaaagagattggcagaattgtacctcgcaaggatcatgtgtttgcatggggtacccaagaagatagtctccgaccgaggtagtcagttcacctcaaagttctggcagaagctgcaggaagaaatggggacccgtttaaatttcagcacggcctatcacccgcaaactgatggtcagacagagcgagtcaatcaaatcttggaagatatgttgagagcttgcgctcttgattttggtggagcttgggacaaaagcttaccatatgcggaattctcgtataacaacagctaccaggccagtctacagatggcaccgtttgaagctctatacggccggaagtgccgcacacctctcttctgggatcagacaggcgaacgtcagctgttcggaacagaagtattagcggaagcagaagagaaagtcagaatcatcagggagagattgaggattgctcagtctcgacagaagagctacgcggataaccgtcgaagggagctaacttttgaggccggagattacgtgtatcttcgtgtcaccccgctccggggagtacaccgctttcagacaaaaggcaagttggcaccacgcttcgtgggaccgtacaaaattttggaacgaaggggagaagttgcctatcagctagaacttccatccactatgatcggcatccatgacgtgttccatgtgtcccaattaaagaagtgtttaagggtacctgaagaacaggctaattcggaacacattgatatccaagaggacctaacatatgtggagaagccggttcgcatacttgacactagcgaaaggagaaccagaaacaaggtcaccaggttttgccgtgttcagtggagtcatcattcagaagaggaagcaacctgggaaagggaagatgagttgaaggccgcccatccgtacctcttcaccagctccaccgaatctcggggccgagattccgtttaaggggggtaggtttgtcacaccccgaagttttcctcccaagtcaaaattgtaatttataattgaccctaagaaaatgctggtgaaatcaggagaaaaccctaagaaagtaatgcaaataataatcggatctgacatgtggaatttttcttgaattctacatgtcgaaattcattaacaggatttttagtggaattttcagagctctagaaataattttaaccaattaaaaatcactaaagtgcaattgttaattccagggaaaatcctttttccttttctttttctttttcctctcttttccctcctttttgtcaagtgggccgtcggcccacttctcccttccttcccctcccttactgggccggccgcaggccgaggcccagcccgacagccggccgcccgcctccctcctctcggggtcgccgacaggtggggcccacctgtcggacccgtctccctcctcccgccgatcccgctcgcgccgccaccgccgcaaccgacgccgcgcccacgcctccgtctctcccgggccacgtcgaccacgcccgcgcgtgcgccgcattccccgcgcccgttcccctccctctcccgctcgcgcccgcgcccgagatggccgggattcgaaaaccgaatcccgcctctctctcctccccactcccccgcgtcggccggcgattcccgccgctcccggccacgtccggttccctctccccctatttaagcatcgccggcaccccctctcgctttttccccatttcgccgacctctcccgagctccccatcgctcccgcgccgtgcaaccacccgccgccgccgcttttgctactccggccgccgctagccgccgctaggctcgccgccgtctcacgccgtcgccgccgttagcttcgcgcggccgaggtccacctcgtccacccctcctccgtcgaggttcgtcgccggaaccctcatctccacgcgcacgggtgagcgccacctctaccgccgccttcggccatggatcccgatcgccatggtccatctctctctctctaatccctatcttctccttccttagggcacgccgaagctcgtccgctagccgacgccgtcctcccgtggcttgccgtcgccgtccgccatcgccttcctccgcgccggccaccctcggtgaggcatcccctcccttcttttccccttcctctcctctagccgccgctctccgccgccgtcggtcgtcgctttgcgccgctgccgcatgtgcgccgccgccgtgtgagcgccgcgccgccggcgccatggtcgccgccgtctcgcgccgcgcccgcgcgccccggccgcgaggtcccgcgccgccgtccgatctacccttgggtagatcggggccgtcggtccggtcgccacgtggcgccgccgccccatccttttcccgtgccgctgaccggtgggcccgcaagccgccaccctctttctctctctcccggtcgctgaccggtgggccccgcctgtcggcgccgcgccccctcgctgacgtcagccctggttaatattgcgcaataaattatttaaggatttcttttatagtaataaacacagtgaatcttctaaaattcataactaaatcatccgagctccgtttaagcccattcaagtctcagtaaatcaagaaaaatgtgtagaatccattaaaaatggttttgttctctgtttcagtagtcttatagcctgtttgcaatgtttgctttgtatgtcgctagattccggttctttcgacgctccggtgtacttcgaaatagtcgccgaggtacctccagcagcagagcaaggcaagtcatgcttgtcacttgaacatgttgatcctatattgcaaatgctccattgttttctttcaaatattgcactgttttataatatcactatgggatggatacctattgttacagccatgcttttggatatcatgctcctttgttagcttgggttataacatgattagactttggactaggacttgcttagccatgcttagttcaactagcacacattggggatctcatttaaaacctagactataggtttatatgataatgttggtttaataccaccactctgatgttggttaaataaaatgaaccacatggtgggctgtgggtgcatggttttgctagtcgcacccatggcagttaaggaccggttcgcgggatgccctggaagaatttatcgtacttaccacaagccagcgtgggcaacggctgggcttgtagtgtagctttcctctagccgacgcatccaggcaagggtgggcgtgatggagtttggatgggccctgcgacggtctatgcggcttccggattcacctaggcacgagaggggactgcccgctgccttgcgaggagtgggggtgaaacctgaggtgtggtgtgcttggttagagggggttatgcgaagggtcctgtcacggcctctttccggtatgtcgtggtgacatgtcggcgcacggaaacgtgtcgtggggctgtgtcttgtgggtacagttgtacacctctgatcagagtaaaactattcgaatagccgtgcccgcggttatgggcggtcaaccagattcaccgtgattagtctcaccctagtgtaatctgttgaatttggatagtttaggtggatggttgggcctgtcgcaacgtgggttagcgttggacagcggatgtttaatactgtttaatttttacaactgttttcgcattaaattcctgtttataaatgccagtatttatgcaaatgaacctgcttagctatcccttgttaaatccatgcatcatacccctattccggtatgacttgctgagtacagtgggtagtactcagtcttgctctacttttccccccaacctcagagctcgagtatgtgtccgatggcgggttctccgaggagtaggcttcgtccgtgccgtcgaggatgcctgtggagtggtgttcccgctgccgttcaagtcaaggcttagctccagttatcttttgttttccgctgcatttctgtaagattttacaatgtttgtaagacgtggatctgtatgtcaacattgtcgtttgtgtaccccggctggtcctggacggggattttaatgcacattctgcttggaattctattcgggaatttctgggcgtgacaactatcaccctttcaggatgcaacctttttaagtaaacatgctatacagtttgatctgacataacatgtccagcttctagcaatagagatacaagctttacatcaaaaaagcatgccttcaaaagataaaaatattatttttctgtggaatgatcgagtaggaaattatgtcttcaaacctgaggtttaaacaaaactaagtacacaaagtacttctggaactagtcaaaatctgaacatattattgatccccctcctcccattgcagactgtttatttgctgaaagattaaaagtatttatgcatgtagccaccttgaatgcctctaatttcatgtttaataatcttgtaaaacatatgcatattattatgttctcacacatagtttaaagtatagtaattctctccgtgtgtgtcagtgtgtttgatgtgtaattgtattattgcctgtgctcaagtttattttacctgttgcttaattagtttacatattagcaatcaccattgtctagtgtctaacacttgtttctttttggatgtgtagttacagggttccatggcccatttgctagctgtgcccattggaaggattgttttgcaagattcttagagactccttgaattgtgaaatgcgatggatgaaagataatttttccttaactgcttaattcatgtagctattatggttgcaggaaccaattttttctacagaattatcacttgtttgatcagacagagatatattattgagtttgattggacagagatttattaagttccaagaaccaatttttgtcttgctttgcacaatggcaattggaacttttattcttccagttagctcaatgagagagatctgatttgaacaaagctgttttcactgaattttgattgttgcaatagtgcagtgccccttcaatagaaattgtatgcgagtacgatgttaagagtggtcagttttagactgattttgaaagttagattctttgaaaacgaagagagatttttgtagtatcaatgttaagttggttcctagcatatctattggaaaacttgtgattattttggatgttttactgcttgtagaatttaatctatccaaaattatgattgtttaaaaattctggactatgtttagagtgcatatgttgtaattctacaattttatttttttggggatttttagaattattttccacgtttaatttttgttttgttttcatgatcaatttttttcttatcatttctagattattttgacgttcgtgacctttcttccagttttttttattttatccgaattttcaaaaatgttgtactcattctgaatttgaagtgtagtgaatggtagtgatcccttctaatcccacctctgtccaaacagagggatgagagggggggattcgcggggagggattgggtgtggggtgaggggacaacccaaaccccacgtgggaggcttttccctgggattaattcccacagctagcgaacaaagcctaaatgcgtgaaccccaccagtgattcatcagctaggagtatatgattcatgtttacatgtgccataaacgttttgctcgattcctagtgtgagagagagggagagagagaaatagctgccttttgctgtgttgccaagtgcaatctcgtgcatgcattgacagaaaagctaccaaccgtatcggcgtaatggcgcagaatactactactactactcttggttgtgcatttttggcgcgccatggggaagaactggattgctactagcgtccaggattaacctccacatggtggtggagccgcagctaaaaattttcggctcgcgccatttttctctcatgtccaacagcatagcagaaatgcaggatccaccgaacaagtacacgcataatggaacgcacaggaagccttcgctgggggcgaattaaagagtcaaatctatgtacagtgagcaacgtgtctgccttgacgaaatgtaatttcgatcttccgaaattcaataggcgaccgtagtagaatcgacttgcaaacaaaagaaaatccttacggttcaggacaggaacagtggtagtgtagtagtcctaggactctatgagtgaggggttgaattgatgaatgctagccctgcttgctgttgaagctcgtagatcgtcagagattggtgccggcctggggagcaaatcttatggatgcagacattggatgggtgcagagcactgtagcagcagcagaggcagggataagcgaggatcttgaccgcctgacaacacgcaacaaatctacacatctgtgactccctgagacaatggtcgacgccgacggtatatctactccggcattgccgtgtctcaggcatccggtgccccgtagtacgtttgattcttgatgcactggccagtttggattttatactctctccgtctctaaaaaaaagacaaaccctgatttccgtttgtaacattggatcatccgtcttatttaaaaaaattataaaaaaaattaaaaaaacaagtcacgcataaaatattaatcatgttttatcatctaacaataatgaaaatacgaattataaaaaaaaattatataagacggacagtcaaaattagacacggaaactcaaggtttatcctttttttttttttttgatagaggaagtagttgtttcagctcaccggcctgttagccagtagtatagcccagtaccgggtacaccgtacacgtgatgcggcacctgcagatttgcagctgcagctgttcgcggcgacaccttggacgccaggatgcaggtccgcgcaccgacgacgcacgcacattgcttcttttgctcatgagcggcggcgagcgtaagctagctaccgtcggctccaccgtgaaggagctgcgcgcgctcggccccggcggcgacggtggcgatggcgatatgcttcttttttcttgaagatagatggcgataggttggttcttgcctcgcctgcaaggctgcaacgcgctcgccggcgtgggggcggggagcacggccagtagcgcaaatggcggggaaaggccgaaacgtaagcacagttgggctgttggatccagttttcacggaccactcctaggatgaaagcccactggcgtatttttgtagatggaaaaagtgcactttgactccctttaataggccgaaatctagttcaccccttctcaaatcagaaaaccggatacaacgactccaagaggttttggagagcagttttgctaacgtggcactcacgcggtagtgttgacctctttgtcccacatggggcttatgtggtattagaattaaaaaaaaatatttcctccgtttcaggttataagatattttaactttggttaaagtcaatctgcttaaagtttaactaagtttgtagaaaaaaaataatattttcaaccaaagacaaatttattatgaaaatatattaaattattgatttaatgaaactaatttggttttacaaatattgctatatttgtctataaacttagtcaaatttaaaacagtttgattttgaccaaagtcaaaacatcttataacctgaaacggagggagtatatatgtgggacccatttgttattcacatacaaaaatatattgtgggacccattatcatccactctctccaacccttcttcctcatccctctctcccttatatatctctctcttttcttttccccttgggccgtggtggcagcaagcggaacgggatgttggagcgggccgtcgccgatgagcgtgatgtaggaggggcggcgagacgagtttgtacacgcgaggaagggcgccctcgccagctctgtttccacatccccagggccaagacgactaggccgtggcagagaccttctataagcccccgcagagccagatactctcggtccacagtcgcggctgccggaaccggctgtgcttcctggccagtggtagcgcccgcggcccgcctcgctgccctagccgtgctggtgcggctcagcatctcccacatcacgtgctcacctctgccgcaacctccagagacttaagaccataaaaaccaaaaacatcgtcagagttatacccacgtacgccgcctccaccccaccagaaccccctctcgtcgccttacatgtttggcgaacctcgaatcaggcagcgacgccgagccacgccctcctcaccagcagcaccacgtggtcccaccagtacgctgaatcgatatcgtctcctccccgtcgaccaccacgccagcctcgccttgcctcgcctcttctcccctcgattggggcctggtcatctcggcgtcccaaattcgtttcattgcccctcctccgtcgcgcccatctgcgatgccctgttcctcgccgccgctgctccagcacctgtcgtcccacccgctgccgccacagccgagaaaagaaaaggcaaaatttgctacagaacactcaaagattgtggtctttgctgtgagatacccgaagatcgtgtatttgctcgtggacactgtaaaaaagtggtaattggctgctggacactccttccattattttattatttttgatgaaaacggagagataaactttggttaaagacaagtttgcccatgggcccacttgtcattctcacgtatcctctctctcttcctcttcttccttgtgctgctatgtgtgccgccgctcgtgcccctcccgtcttcgtctccgattgtcgcggcaatggcaatggaggacaacgcggcatccgcggactgaatcgcctcggcgtcatagggatgttgcgtctgctggagctgcttgtacgttgccttcaccgccgacacgccataggatgctatcgccaggaccgcgtgcgcggcggctaggtggcgcggctaggtgagcgtcgtgcggtggcggtgcggctttgcaggcgtggcacggcgtgacgaccgggatacggcggtcgtggccaggcgtggcgcaggtgcaggctggcacggtaacgcggatatggaagcgacccgacgaggatggtaatgacgcagcccagcggtgtagtggccggccgaggggcggtggagcagcgcggaccggccgtgcggcggctgggtggtggcggggcatgcacgattccggccatccagcgggcagtgtggtgcggcatggcgcggtggccagatgcggcacggcgaccgggatgcagtggtcgcggcttaccgtgcgacgacgatgacggcgagggtgtcttcgacctcgtcttctcccctgacagccggctcattgcctccgtttccaatgagaggggattgggtctggttcaaccagcgtttacaagcaaaacggcacgggggcattttggtactttcaacgtcctttctctctccagttcagccaaaaaataataaaataatgggaggggtgtccagcagctaattaccatatttttacagtgtccacgagcaaatacacgatcttcgagtgtctcacagcaaagaccataatctttgagtgtcctgtagcaaattttgccaaaagaagagagagagagataaggaagagagagaggaaggaagaagggttggagatagagagaggatgacagtgggtcccataatatattatttggcatttttgacatttcacacgatttctctctcctcttcaattggaagttattattttagtcggcacggtgtccactggcaaaataccacaattatggattgttttcctccaaaagttagtttttgcggtgtcctagggctaaaaccaggcacggtgtccactggcaaaataccacaattatggattgttttcctccaaaagttagtttttgcggtgtcctagggctaaaaccacacaatagcagtgccttgtagcaaaatttccttatatatttttgtgtgaatgataaataagtcccacatatatatttttttaattctaataccacacaagcaccacgtgggatgaagaccaggtcaacagctaagagagtcaaattgcattggttttaatagttcaggagtcatcctatctgataggatggggattgaatacgggaccttaagattgaaaccgcacaccttttaccactacactatcaattgcatctcgctagcgataggcaccaaaaaaaaaaactgatgtgttggattgatgctatagcccacaaatctgcaacaaagggagctgaacaacgccttgtttcctcttcgaaatttcggtaaagcccattgattttcagaccgaccaaaatagggcattcgaattcatttttttgcctacaaatattgttcagaatctatcggttttcgatcggacttcacgaaaatcgatgtgccactagcgtccggcatgaaaagtggtatcggaattgtaaacagtactccgaacctcccttcccccttcggtgagggggcggaggacttttttcgagtccaagtctatatgcgtagggggattccttgtgcgaatagacattgtcccccaatgtgatgttgcatgtccgattatattacgtgcatcaaaatccaataatataatcacacaacatgtatcaaattcgtcgatttagtgcgaaatggcgcgaatcgggatacttgccacaacgtttctaggccatgtttgagggagcttaagactttgagaatccgctggttggtagccaacttctgagaatctagagaagccgggttttctagcttctgggttctagttcattttccggattctacaactacagattcctagaatctgggtaaaatctggactgtttggggtcctaaagattctgtgagaagctataactgctagatgctccccaaacagacccccagtctgttagtgggtcgcatgaagcacaaatgagtcgcttcccattttcatgcctcgatattatattcggcctggctacgtggaaggaagctttgccgttaccatggatgagccattgccctatccaaggtttgtccgcactactagaaaagctatttttgcaggcggccaaaacacattttcgcatgtggccaaatactctgcctatagcaagatgtgaaaatcgtcgatttttgcagacggtcatgggtctgcctgcaaaagtcaatttttgcagaaggacccattaagaggaactcttgccaaaagaattgtgtgcaaaaagaaaaataaaaagcaatatattattcatggcatgcaaattcacattgaaagacacatccgtggtggaagttctcaaaaaatatgtggaagttcacgttcaaaatcacattcaaatccacacccgtatttttcatagcaagttggaagttctcaacaaaaaagaaaaaaaacatcaagttggacgttgtggtggtggtcatcgtcgtaggaaggatgccaccgtcgctgccgaggagccgatccggaagccggcttcctccaccatgatgacgaggaagacaaccatgagcaatgcgaggagggtgcgcccccgccacccatgcgtgtcgctgtcgctggatccacaactcacgtgtgtcgccgtcgccgaatcctcctcgccgcgcgtcgcctttaccatatttgctgcccacgcatgccatcgtcgctggatccccgcctcccaggtgcgttgccgtctattatcccgcgcgccacggccttggagagccaccgctgctcccttccccaccaccgccgccctcgccaccctcatcgccgaactaaggagaagagagggggttgggacttagaaatatctgatgtttcagtttcctctagcatctatttaaatgccacaaccaattttcacaagcggacgacttaagaggtccgcctgaaaaaataaaggtatttttgcatacgcacctcttaagccatccgcctgcgaaaatagatttatttcctaggcgggtggctattagacatctctccatacaactagggaggcggacaatcatagtcaaaaataagttcacatacaaaaattatgtgttctgctgtagaaaactgtttttctagtggtgccaggatctaccattttgtttgtcacgttgagttggctgaactctacggtgtgtgtgtgtgttggggggggggggggggggttgacttgacgttggcagaggagagctcttcccttttcggtaggggcaagatcactcttgatgactacggggtcaagaaaggcccaagtagaactcctatcctgcgcggaggaaattgctttggcgatccaatggactttgctgtctattgtagtagagactgattgtttggtggcctcttagctcattcagtctaaagagaagtatctatcagcactagctcacaccattcaagaagttaaacgcctccgcgctggggaaagggaaatcatcattcagaagatacaccgctcccagaaccatatatgcaagccatgcgctagccaataaggcttgttcagagtttgtttctgatttttggttaggagaaacctgtaattttatctctcagttagtttgtactggcactttggttgagtaatatatttctactcttcctcgaaaaaaaaagagaaaggcccaagtagcgaagaggaggagaacaccaaggaagtggaagatgatcctccgcacacagcacactaccggcctcttgcacaattaaacccaaaaacatggagatggtggagcaaaaccaacatagcgcacaaatggtgggtaacactagcaaccgacaatgacaagccccgccaaaggcatgttcgtacactcgtcctactaattgtatggaaaatatggaagaagaggaaacatagagtggttcatcacaagagctattggtgccatctttggccgtaaaaattaatcggctctaatagcagtaaaacgacagatattattccctagtttctccctttccccttttgtacagttccacaccatacttgtaaagctccctttgcactcctatattcaatgaaatttccacaccttatatcagtccattaaaaacattcctataattcaaatttgtacacaatacaactatttcttcgacaccaattttaatgcaagtgaatcaaagcatttgggtgcttagaaggggaatttaaacaattaaatttttgtaatttgaccaataagatgaatatttctgtctaaatctttgtaagaaaacctagcaatacttacatttagaaatgaagtaatcagtatgcgaacgaatcgtcagtttaggaagtactccatatgtcccaagattattgtaatctagattactgagctagattactataagctggattataataagccgacatagaataagctgttagttgtttgtttctctttattagctgttagccacctactccctccgtcccataaaaaaccaacctagtacctgatatgatacatcttagtattatgaatctggacatacataatactagaatcttagaattatgaatctgaatatatgtccagcttcgtaatactagaatatgttacatccggttctagattcgttttttatgggacggagggagtaataatctaaaagaaacacctttagagtggattatcgtattatagtaatttgacttatagactgtaataatctatcataataagctatctcgttgtttcagtttactcataataatccagattataataattctaagctgaatcaaacagagcctaagttaatttctacggtttaaaatatgttccaagataagttgatttttttaacttataactatcattagtctataaatcgagaagttttagtacttcaattctccatatctacccgctcactaatactactacttttattctattaacaagggacaatttcctttttcccaaccttgtaaaatttttcttgggaagtagggactcgatttatttgggagaggcaagggctgatctacattaattatgcttccctgttgcctagcacatccggtaaaatctataacttcaatacgaatagctggtttaaatgataaaccatccgtcctaaaacatggtttatataggctttcacctagagatagctgtgttaacagaagtgcaccgtacgtactgaccacgccggtttgatcgagtcgatatgacctggccaaacggctatagttaacatcgtatggtggcaatgctgtcattgaattttttttcatttacataaccctgtttagtacgacaaactgcacaaatcaacgtcgtcctccttgcaatatgccaactcgcctagtacaaatgatagtactaagtgtcgtatttgaaaattacatgaggcccgacgtcagaactagctactaggcgacattaagcgtgaacgcggtatcttcttattcttaactgctttagaaacacagttgtcctcctttctcttcttaaaaaactgctccccttctaaaaaaactcaaaaaatgaaaaaaaacatcttgaaaaaccaacataaaaaactaaagcatattaattcatggaaaataaactagtatttgaagaaattataacatcttatatttccgttcaatttgatgcacactttatatttcagaagactagaatttgggatttttagaacaataggacatcaaccatttcataaattttagaggggccacagaggagatgaaatttttcgtatttttgtggggcttcctggtatagttagtgacctccagaaaaattaccaaggggaatgaatgagcatagcctcctctagaaattgtttagtgccggctggtccagaattttagaacttcaaaacttgtttctaggctttcaaaatctgtaaaaactttatgttgaactcattggacagtatgaaattacatatttctctttacaaaattttgctttctatcatggagtgagggtaaatttcttacactcgacatatataccggcttttacatcgatctgttatttgactcacgggccggagaaaacatttgttttgcatatgaaatcacatcaaggtaacataaggatgttcactagaaaaatgtgaggaggaaaaaggtctacgcatcctaagagttttcatagatcgttcaagttcaatatttttgcagttacttttcaaatcaccaagttaaaatctagcctacgtcatcactgttcttaagcataaccgaatttctctctaccaacttcattctcaaacaaatgatatatttaaatgtgcatagtcgaatcttgaagtttttttattacgaatatataaaaaatgttaatatttggcacatgaaaataacatcattagaaatttcacaaaactacagatactttaaccaaattttcataaaactacagatttagcgtctaatttatgacaaaactacatatttaggatggaacaccataaaactatagattagataacaaatttatcacaaagctataagtttagtgccaatttaatcacaaaactacaatgtttatagctctaacataacggtagtactagggatttaaacttcgaaatatgtagttttatgataactttagtatttaaatatgtagttttgtgttacttatcattaaatatatattttagtgataaattcggtgttaaatctatagttttctgatacaacaccttaaatatgtagttttgtgatagtttggttaacgtatctatagttttgtgataaaatactttaatgttgttatattttcaatatttttatgatatatgattataggataggcaaaacaatcaaacaagtataatggagaccatggcagtatcctacattataagtaagaacaaacaaacgtaatattatgctttaagttcgtccatgggaaataagatatattagctgggagaggagagaggacccgcatgttattaaatttgttctcaatagaacgacataatgattagagtttaatcaataactcttaaatcattaatagatggaacatattacggattaaaatgcaaaaaaatatattataggattttttttatgaaaaagtctttcatatagttgtattttattttaattttttatgaaaacacgcatagcataagaggtaaggataaaaacatatgaattaaattgaagaccgtgacgatgttcaaaacgcatcaagcgaaaaaacaatggatgttgtatcggctgtctaacatattgttatcaaattaaagctaaaagaagttatcatgttcatgtgttgatttgcgtcaacaaaagtaaccatcggcgacggaaacactatgcgtttttgggactccgtttggatagaagggcgtaggccaaaagacctcatgccattggtcaacgcaatctcgaagaaagtccttacatcagggaatgaaaaataatgcttggatcaatgacttagaccttgaagccaacccaccaatctcggtggaccttataggtcagttagtcaccttatggactgttgtgcgggacatccaattaaacgaggatcctgatcaaattacctataagttcacaagccatggccaatactcggcgtcgtcagcttatcaggcaccttggggcaccaaacaagattttcatctctctcatttggaaagtttggataccggggaaatgcaaattccacgcatggctagtcatccaaaacagggtttggaccttcgaccggctcgcgattagagaatggcaaaataatgggttttggcccctctaacatagagaaggcgaaacggctttacatcttgttgtcagttgcagatacacaaaaagaatatgtagcatggtagcaatccgggtggcttacactactagaaaaacgatttttcatgacgttggtctatttcgctggcggaaaaatgtgaaaaccgccagcaaacttgtaacgagggggtgaggggcaccggccgccaacgaaaatgcattttcgctggcggcccatctaatgcagccgccagcgaaagtatgtctatttttgctggcggtcaattaggtgcgccgccagcgaaaatagataatttttgctggcggtgcaatttttcatggcggccaataaatagaaccgccagtgaaaatccaaccaaaaatatctgtcacattaaaacacccacctacccatcctcatcctcttctccacattaaaacacaacacatccactcctcttctctctcctccctctcctccctcccagcctctccacctgcgatggaggcgatggctctggcggcgacgaccggcgactgcggcggcggcggctctggaggcgacgaccagcgacggcagtggcggcggctctggcggcgatgactggtgacggctctggcaacgacgaccagcggcggcggctccctgcgtcgcccctgccctcccatcccctcctctcctatctgtctgaggggaggaggccgccgccggtggcacaacagaggcggcgacggggaggacgtgcaaatctgccccggcggtggcgcggggagcacatggcgcgggaggcggcggctcgtccccgtcggcggcggcggctcgtccccgtcggcggcggcggctcgtccccggcagcggatggcggcgacaacagcggctcgtccccggcagcggagctgacgacgacgaccgtgaccgtggtgacgacgatgaccgcgatgctgccggcaagcgtgtttttgtgtgttttggttccgcgaccggcagatggcagcggcggtggctcatcccgatggcttcggcgactagggttctctgtgttttttttgtgtgttttggtttgtaaggatgtttgttaggttaatctgtgtttgttctgttgattatgtcaatgttgtatttggattgatgccaatattatgtacgtatttgtgatgctctggatttggattgtgtttaaatgatgtttatgcccatttctaaatatggattgttttgaatttggccgggtggggaattttgaatttggggtagggaatttttggcggggtgggttgattttcattggcggttctctttaaacaaccgccagagaaaatgggttttcgcaagtgacactcaaccgctagcaaaaatcgtttgtccgcttgcgaaaatttactttcgcaagcggaccgcaaccgctagcgaaaatcgtgtgtccgcttttgaaaatagattttcgcaagcggaacgaaaccgtcagcgaaaatattagatcttcactggcctttactttgtggcggctccaaattccgctagcgaaaatctaaaatggccgccacgaaagatggtttttgtagtagtgttaccaatagcttgacccttggacaatgggaggcgacccataccataaaagactggtgggaagctctagcaaacacaatgcgagttccaaaaaagggactgtgcactctcatcctccttgtcgtttgggagatctggaaggagaggtaccaacgaatctttgagcataatgaggctacgttgtctttcatttttgccaaaatcaaggaagaggcgtggacatgggcaacggcaggagcaaagcgcttacttttgcctcacactgtatagtgcatatagctttttcccttttcttgccctaaggggctgtatttttctcccgctatatttaatgaaaagcacaatctctattgttttcccttcaaaaaagattctgatatgtctttttttttatcgattctttgtatttacaaaattagaaacaagagccgcataacaaaatacaattctaatgattttcttaagtttaatttgactccaaataattgcatgggaaattgggtaattaattaattatgtgaaaggggtgggtgcaaaactatcaccttgaccacttcaattatttaaagtagttcttttgcctaagggtagtcccaacccatagtgtccataagtagtgtctatggtgccatgtcaataggacatcataatagaaactacactctacaacccatgatttcttaaagtgggccattaataaatacatcatctctcttctctacctatcatatttattcttcatctattacgaagacactgttcgaacgataccatgggttcttgcacgactctatgcttcaaagacccggtggacatgatgcaagcaaatgggacctgtgacggcataggttgctgcacgatcgagacgatgagggaagtgcagggctttcggctaaggattgtccgtcaagatggcatcggccaggtggtgccgcaagaacaatccagtgtcaaggcttgcttgacgtatgactcttattagtttcgcacggaagatctttcctccccttggatcaacggaagcaactttctctatactacgatctacggtgccatcatggaccagccaaactgtcacagcgcatccaagaacaaagcaacctatgcttgcagtagaaactctcaatgcttcaatgcggacaggggtggctattactgctattgccccgatggtaatcccaatgggattccttacactcaagaaggctgtactggtgagacttctaaccaaaccaaaggctgcagaagttttttttatgtagagcttctaccttattaagtcaattaagtataattagtacttttatgattttttgttgtgcatacattgaattgattagttacatgatcatcaaattgcactatttggatctcttgtctgtcataatgatttcgaaaaaaaaatattggttaaaaattttggggagatctaacagtgaaacgacagaggactcggggtgcgggctaactaatggagcctatttgccaggtcggtggtgatggtgtaatagtatagattgtccattgtgaggtccaaatatcgctgataggggtggtgcggcataacaatcatcactactgctccctccgtttcaggttataagactttctaacattgcccatattcatatagatgttaatgaatctagtcacatataaatgtttagattcattaacatatatatatgaatatgggcaatgctagaaggtcttataatatgaaatggaggagtaacattttaggtagtattgatattctatcagttccatacaaatttaaaagcataaatttcacaaaactatagataatttgactaaactatcacaaagttacaaatttaaaatgatccattacaaaaccacaaatttaacatcaaatttatcaaaaaaatattaagatgtagtatgttaaaactatatattttgtaataaaagttttcagagttagtgctcatttaactaaaaaatatataatgtttataactccagtagaacattagtgctaagggtctaaactctgaagcgcatatgtagttttatgataacttcattagtaaatctatttatacttttgcgataccctattttaaattatatattttcatgataaattagtgctaaatccgtagttttctaatacgatgtataaaagttgtagttttgcaagatcaaaatatcagtggttttaccaaatttgtttatttttaattcttaagtgaagaaaactttacacatgcatgttgcatcttcagtctaaggctctgtttgaatataagtagtagtagttttttttttcagcacgcagaggtaaccattagcacataataaattgagtattaattattataacttaaaagatgatattatttttaagagattttctcagtccaacaaaaagtacctcgaggtaccggtacctcacggacctcgaggtactttttgttggactggagcaaatcttttttttaagttatatatagttttaagaaaaatacaattttagcattttaaaaaatatgctcaaagtaaacgagagagttgtgaaaactaaacaaactaccgaacggagcctaaggcatccactaaatttagataaccaaacccatatatatatatatatatatatatatatatatatatatatatatatatatatatatatatatatatgctccttttgtgaaaagaacattgctcataatataatagtttaatttcctgtatcattgagcaggttacaatccctttccgaaaggaatatgtaacagattttgtggaaatacaaatgtgcccttcccatttgggcttgaagaaggttgctacgcgctagaaaagtttcgacttaactgcagagcaggaaaactatttctggatcgaggagatgtagactatctcgtgaggaacatttcagtggacaatggatatatgagcgtaaccaacgagcagaacaattcaacttctaacggcacagagatcatggtagttgctcgtactatgcatggctcctcggaagatgaccctcagttagatctttttgatttaactcaagaaaatgatatgaagatgtggtgggctgtcgtgagttttacttgccaggaagctacgcaagacatcaataacaattcctatgcatgccgtagtgtccatagcgaatgcatcgatgtcaatgtaacacatgggacacagcttggctaccgttgtaagtgctctcctggcttcggaggaaatccatacatcgaagatggttgcacgggtgcggaaactctctctcttaccatcgttttaagatgattatttcttacggatcatccaaatttgtgggctagctgtccattttataccatgttatgttacttttatctctcttaagccttatttgagaaaaataaaataatgcattattggcgtggagtagtttgcatgtagacgtgatatgtcaccacagtaacatagcaattaattcgaaggactttaaaggtttcgagaagtgcatgctgactttttcttttgtttgaagatgtcaatgagtgcttgctaccgaactactgcaatgggagatgtcaaaattttattggaggctataattgcacaagttgccctcgcgggaaagagttcgacccaacaagaagggaatgtgtgacatcagctaagctcattagtaagttatatatactattgaattgccctcagtggttaatacttaattactctaaaaaatctacctgaggcaatttataggtgatgttctgactattgtcgatatataattgttgtaggtatggcacttggaattagttgtggtcttggctttgtaatgcttgcacttggtgcaactatacttatcaccaagtggaagagaggtatacagaggagaattcgaagggcatatttcaagaaaaaccaaggcctactcttggaacaactaattatagatgaaaatactaaagacaaaacaaggatattctcattggaggaactagagaaggcaacatataactttgatgctactcgagttcttggtcatggaggacatggtacagtttataaaggaattttatccgatcaacgtgtggtggctgttaagatgtctaaaatagtggagcaagctgagatagatcaatttgttaatgaggttgccatcttgtcgcaaatcattcatcgtaatgtggtgaagctttttggttgttgtcttgaaacagaggtacctttattggtttacgagttcatatctaatgggacactatgtgaacttcttcacaatgatgtaagtgctaaatgccttctatcatgggatgatcgtattaggattgcaatcgaaactgcaggagctcttgcttatctccactcggctgctgcaataccaatttttcatagagatgttaaatcttccaacatactcctagatgacaactttactgcaaaggtttctgactttggtgcttcgagatccataccactcgatcaaactcatgtggtaacaatggtacaaggcacatttggttacttagatccagagtactacaacactagccaactaacggggaaaagtgacgtgtatagttttggagtgatacttgttgagcttctgacaagaaagaagccaattttaataaatgatgtaggtacaaaacaaaacttatcacaatgcttcctagaaggacttcagcagggagttctgatggaaatcttggattcccaagttttggaagaggctggacaggaagaaattgatgatatcgcttcaattgcacaagcatgcttgaaagctaaaggaggagagagacctactatgaaagaagtagaaatgagattgcagtttcttagaactaccagactaaaaaagtgccaacccatttctgtaatggatgaagagattgagccttttatttgtccaaagaccattagctctgatgctcaaagcagtttcatccatactgctggttttacatcagaatatagcacaagaagttacaggttggagcaggaactctcgtcctcagttggtttgccacgataaaaatttgcgcaacagcatggtcgactccttgaagcttgttagaaggcatctaaattatttttcctatattttcataccctatttttatttaatttatgtatctgtctttatggtgttgtaaaaaaaaagtatactgagggcccctttgaatcgcagggtagaaaaaacggaggaataggaaaaacataggattctgacaggaattgaagtgtaaaacagaggattgcaaaacacaggaaaaacacaggaatggtcgtttgattggagcgcaggaaaaacgcaggaatcggatgagagagatagactcaaaggaaattttccaagaggttggagctcttgctaaatttcctccaaaatctacatacaatgtgtcattccataggaatttcataggatttggaaagcttcaatcctttgaatcaaagggccaaataggaaaatttcctataggatttaaatcctatgaaattcctacataaatcctttgattcaaagaggccctgaatatgtgtatcttggttttctctacttccatgttgtatctgtagagcaatatattatcattgtgcttgtatggtgacatttgagaattgaggtggtggactggtgataatgtatagacgtattagtaccgttgttcggcttaggtgcaagggcaccgcactgcacatagtaaaatacatgccaaatcacatcatgacacccgttaaggtagcaccacccaatcactacttctctctcctagctcatttcatcgcttcttagagccaatacaataatataaccaacagcgagctataatttttaccatgtcatcttgagatggaggaataaacgatcactagaacagaaatctacagtacgatgataacagaagcactattttattttattagggcccaccattcccttttgccactctctcagccaactgtagaaagtagcgctctgtgttagagcctgtgtaaaagcgagcgcttaatctatcatcgactaacactctctttcatgtatttttctctcaagctcatcaatcatgttaacatgtacgtctatcaccggctgaacatgctctattgaactcactcttagagcaagtttaacatgtgtagatagctaccggcgataaaaaagaacatgtcagcggcatcagataaccaaaagatggtgtacgtacagaagatggctatacatacaagcttcaatgaattaatttatcttttctttttgagaaaatctatgaaatgccattgacaagaactctaatcccagaaatgccattgacaagcgcaacttcctcaaaatgccatcgtacaagcgtttttctccctgaaatgccatcacagtcaacttaccgtttagtccacaccgttagaaattttttttaccagaatgacaagattaccctcgctccaaattttactatccagagggtaaaagaaaagaaattggggaaaagaaaagacaaccctaaacctaaccgatggggggcgacgacggcggcgatgcggtgtccccaggcgacggcgcggtgacggtcgcaggcggcgaggcggtgctcccgggcggcagcacgggggtccccggcggcggcgtggaggtgctctcgggcggcggcgcgagggtccccagcggcgacacggcggcgcttgcaggcggcgaggcggcgctcccgggcggcggcgcgggggtcccccggcggcggcgcgcggcccccaggcggcggtgcggcggctccaagcgacggtgcagcggcccccagcgacggcgcggggctcccaggcggcggtgcagcggccctcaactgcgatgtggtgctcccaggtggcggcacggcagctccaggcagcggcgcatcggccccaggctgaaataattgatagcaaaatttctgaaataattttgatgcaaaaatttgtgaatttaattttgaaataatttgattgatagcaaaataatacacatatgtgaatttaaatatgcatcaattcaaaatgatattgtgtgagcaaacaatacaaaataatgatgttgtttgagcaaaaagtttgcccaggggtaagattgtcttctcatacaacttaacggagaggagttaacagcagtatggttgtgatggcatttctgggagaaaaacgcttgtacgatggcattttgagtaaattgcgcttgtcaatggcatttctgggattagagtgcttgtcaatggtatttcatggattttctctttctttttactaatttaactttccaccagaccatcactcgctcattactgcacatcatctcgtgtgtggagcccacgtttgtgttggataagattttctatggtttctctagtcttggagcttgtgtttagttggcgataattttatcgtcggcttgcactctcttttctggtttttttcattcagctcatcagttttgtcaggttggttgcgctatcgctggtttaaacttcttattatacctgtcttatccccctcttcatgcctttcttttctctctatccaactcccagaaaattaagccacagagcacatcttgcggatcttgctgtactctaggagcaagccatgggaatggatcgtaggatcgtagtgctcacggtgacttccacgggatgaggcgttgttgcttgccgatgggtaacgggaactgctgtgctccgaagctgcggcgctgtcgaggcaggtcgccggggtacggagcggcgttaccgcgttactcgtcgatgggtcatgcgagccgcggcatacagttccttcgtttgttgcaaatcacatttatcgtgccagaattttcaaatccataagccaatatctgctgcgagagtggattatatattctcacgtacgggaacatctctccatgtttacctattatatccaaatagttatgaatttctttttaaaaaatcaacaaaatagattaatatgtgatagatcactctacaaacaggtaagttaaaattcaacttttacaagttgaaaaaaaatgtctacttaacatatattcacaattaaatttatttttattgcaacttgtataaattaaaatttgacattgcatgtttgtggagtaatttatcacttattaatttatcttgtttttttttctaatttatcataaccatgtgggtgacaagcaaacaacgaagaaccccttaagagtttagaatagttcccctatttgttgcttacctttttgtttagataatgaaaatggtttacatctccgcctcaccaatgttttttaaatgaaaacgaaagaaaaaaaaaagagtaatgggacaagttcccaactcctctgagaagatgctgcatacactaatagaaaaaagatttttcccaaggaggcccatatcattatataggcaggccacattttcggccacaaacgttacgtttgcctgtatagttatgaacggggatacaatggatatccatctgcgaaaatgcaacttcgcatgtgaacaacttaagttgtccgtctgtgatatattttagcatacggaaccttaagccatccacttgcgaaaatatatgaattattacagaagggcagaagggctgcttatgacgcccgtctgaaaaaatccgatgcgatgctagaccacccataaatatctaagtgaaagggactcatccaccacccatacacccttactattgtaccatgtatctctaaccatagctctaaatgatatggaaatttttggggctatcaactggctatactattgatcctgcttatggcccacaaagtcaccactacttgtgtcaatttgttattggacagtgaacagatcatcgaagtgaggtcctgacaaggtatcatatccttccctatccagatatctaaccggtattacacgatacctattaggtatcaaacgatttttatcacgtatcaaatcatacttgagaggtatcaggcgattcctaccaagtattaggtgatacctataggtattgatgatacttagttggtaccatatgttcatactcgtcgatatcacctaatactcgtcgataccagagcaatacctaccagatatcatgtgattcttactaaggccctgtttgggggagctttaaattctgagaagcagctgtttggtagccagcttctgagaatctggaaaagctctgaaacccagcttctatagcttctggcttcgtagtttatttttcagaatatgtaactacagattctcagaagctgtggactgtctggatcagtttctagcagaagcaatttttgagaaaagctgcagctgagagaagctcccccaaacaggacctaagtataaggagttgggcatcgagacgtcgtcactggtggcaatgtcctccatgttgagcaggttcttcaccgtcacgcctcacgctgaagctttggtggcagcgggcccaccatccacgtcccaccccagagcttgtcgccggcggacacgcgtcctccatcgtccacgtgggcgtggctacaggggcataatggctgtctggctgagccgaatgaggcctaggaagtacttggactgggatttgagaggctttccgcataagttgtgagctttgtttctgagaggaaaagccgaaaaaggttgtcgcagaagaaaggagaaggaaaaaaggccgcttggaattttattcacatccctcgaagaagacagctccaaagcaggagctcctcttgttacagaaatataaggtctgtctgaagctccaaatattcatcattatcatcaacctatatttctatctgatgacagacggtggccgaagcaattcgaatagatgacttcatcaatgagctaggacattggaccctaaggcctgcattttacaaaataaataacattctgtagggtcaacatatgcaaatcaaatcaaatggattcctagagaaatgaacaaggttgctgatggtcctgcgagagcaactagacaaacttcagagcaaaatcagatggcctttgactgtagtaatagtactcatatttgccaacaaagtgtatgtccgatcaagaaaaggagatgtaagaatcactcttgccttgtgtttttaaaactttcaaacaaataaagtgcatgagttctaaaagaaaaactagaaaacaatgttcccaactatcaaaatgttatcggattctttaggctatgttcggtagctaggtttgggaactctcttcccgtgcacgtaaaatggagcaacttattaccacatagttaattaggttttagctttttttaaaaaaaatataatttttaaagcaacttttatatatatatattttaaaaacacatcgtttaaccgctcgaacaaggtacgcacggagaatgaggggtagacaatgagtagttgcacgttcatacacagcctacaagtatggcccaattagtttcgggtttgttagagcaataactacactttgactcccttaactaggggccaaatctgattcgtatccctaaaccacaattccggatatctcaaccccctaactattaaaaccggtggaatttgactcccacgatggttttgaagggtagtttcgctaacatggcgcttacgtggcggtgttgactcggtcttcattccacgtggcattgatgtggcagtataattaaaattatatgtgggaccaatttgtcatccacacaaaaatatatggttaattggatctatgccactggaaatgtgataaattagaaaaatgtcactactattcgcgataacggctaggtgccactggaattttgagaaattagatccatgccactccatcacatttttcgtccttcccgtcactctttccatccttcccatcactttttcgagtacggaggccagcatcgtgggcggaaggaaaacgaaatgccgatgaaaaatggggagcggcggagcggatgaaaaacggggagcggtgtcgtgggcggaagggaagggaagtaggcggagcggcggagttgccggagccgctgctttctccgagcccctggtgtggcaggcgcgccactcctcggcgcagcctcctccccggcctctctcccttttcatcttagatctgcccgaagggaggccgtcgacagcaatggcgcccctccctgaaggcacggtagcggcggcgcgactccctccctccctccctccctccctcttcctctcaccctggccctgaggggggaggggacgaagaaggaggacgatggcggcggcgcgactctctccctcaatcctggtggtggctcggcgacaagtaagggcgacaggagcccagctcctctctcccctcttctcctcttctcatccctgcttctcccttctaatcgcggtggtggagctagtttagggtcagggcaagaggcaggcctcaccgcggtgctcgcggcgacccgcgccgcggccgacatgcgcgtcaagctcagacgccaggtgcagtactccgtccccctcgacgaccgctcctcggatgccaacacggttatcaagtacacctccgcgagctcgccgccgacccactcctcacctgctacggtgcagtcctgcttcggcttcagcaggagctacaaccttgtcgtctttgagctctcacacaactcacttgatggccccataccggacgcccgcacacacgccgtcgctgctatagcacctgccgccacccctccggcccccgctcgccgccgccacgaccgatttggcccccgttccccgcgtacatccgtaggggaatagaaaggaggatagaaagggagggaagggagataaagggaggaggaagaagggaaggagagaggatgacatgtgggcttcacatataagtgggtcctacaatattttttttggatgaaaaatgggtcccacatattttttttaattctactgccacataagtgccacatcaacgccacgtggaacgaagcccaagtcaacaccgccacgtacgcatcacgtcagcgaaaccgtccttcaaaaccatcgagggaatcaattgcaccggttttaatagtcgggggttgagatatccggtattgtggtttagggatagggatggcagttttgcccatgggttcgggtatccgcggatacccgacccaatgggcacgggcatgggtgtaaaattttacccgtgggcttgtccgcccaagacccgtagacatcgtgggcaacagccgggcttcattttttacctgtgggtaacccatgcctgacccgatacatttgtattagctaatttcgatttatctcttaattattatacccccttctcttggttcatttgtgatactaactaataataagttgcgatgtaattcaaattattattgataattgataatttggtaaattgttgattttatttttctttgttaaattatatatctttcgagttattattcatgtgagatccattgggtacccgacgggcatacccgtgcccgtcgggcatgggtacgggcatagagttttacccactaaccctagtgggtaggatttgggcgggcgacgacgggcatggggtcaggcatggttttgctctacccgtgaccaacccgacccgttgccatccctatttagggatacaaatcagattcggtcactagttaaaggagtcaaactgaacttattccttcgttagaaacgcagccggcccagccgagcccggagcccgtgcaccccggaaccgtgcaggctgcctacgcgaaagcggaacagcgccaccgcgacagacaggcaggcagcaactacccgaccgatcgcctcctcttcctcctccttcccacctcccgcccacgcctccagatctccgcgagcttcgaccgccaccgcgaccgccgccgcagcaagcagcgtcatcccccgcgcgacgccaggcatggcggccttcaccaagctcgaggactcccccatgttccgcaagcaggtgcgccgccccgccgaaccctctcttctctccctgcccgcgggaggtgtcaccttttgatccggtcctctcagggttcgttgctttcgggcgagatctcgcctccggctccgcgtcgttggtatttggatcgtacgtggtgggggatttagggggggtggagctggaggttggggtgattgtggtagctttgggctgggatttgggaggttgggcgcattctgtgtggcgagatctcgacctgattgcatgctttattggccgttgattggttcggaaatgcgattgttcctgagtagaatggatatcaaattccgctttggtttcgacgaataccgtaggttggttttgatttgccggcatgagtgcattgtaggttgcaaaaggaatattattttacatttattgtgtgttctctgttcctttcccgatcgttttcatctttgagcagtgctgcatttctgattgtaatggtgccattttatttttattgctgcatcacacacttgaacaattttttaattcatcgtctaatttctcgagataaaatcctgtaaaaacttagggacgaaataagctagacgattttcttttccagttcaaatggctggtttgggttattagaagccatagaaaaaatagtgacctattatttaggccctgtttgtttcagcttaagtttattgtaatctacattattgagccagattactgtaagctgaattataataagccgacatagaataagctgtgagctgtttgtttctctggattataagctgttcgttagctgttagccatccaataatctaaaaaaacacctttagagtggattactagattatagtaatctggcttatagattgtaataatctatcataataagctatctgtttgtttcagcttattcctaataatccagattataataattctaagctgaatcaaacagtgccttagactcgaaggctgtgtgtagattggttttagtagttttaatatataatttggactgcaagcttcctgcttgtgctatcaagttgaatcttctctttttcctgataaatccttttgttttcatcttaaacagacctttacatgcatatatgctattgattgcggcttatttccattgatttgcaggtcaattctatggaacagctaagcgatgaactgaaacaacggtgttcaaatcttcataaaggatgcaaaagattcatgtacattaagctcccaactactgttttttttgggcgagctactaactttgcagcacaggcgtacactcgatgcagaatgcgtagcatgattattattattatttttggtttaagaaagacatcactctaggtttatgccgatgtaagtcaatatcaagtttctgtagcatacaaccttttactgcaatgcacacaattacacgatttcaaaacttgtttctgtttctatggtccaatatgaattgtctgcaagtttatatcgacaaaaatgtttattggataaaattgtgtcaataaatgactttgcattcttctttcttacttttctagttcaggattaatatttttttgttaccatgttacatgtaataatttgtagttcctattgttcctaggatagacaacgataataaaaaaccatatgttcgatatattgttttgttatagtattgctgataaccttagtttcaggggatcacttgatgaaggatacgcgggagatctaacatttgccgatgctctagaagcatttggtgctggtcaagatgatcctgttagtgttgccattggaggttaatttcatcaaatctctgttatatctgttgcttaatttttcctggtttcccatccatagatagctaaacaactgagtccatccttgccaattgctaaacatcttgccacgttggtgtccttttgtctcctatcgattatgtaccacatctttaattttatgtctgttccctctcttaaggaaagatcacagtaacagatcattagaatatatataaatgcagacataagcaagcacatactatgtacttcttttattttacttattaatatgttgtaggcttgtagtatgataacacaatgtttcttaactgtaatggtttaatgcaatgccatttcactgaaattatggaatgcaaatttgttaataaagtgaagttcatgaacacattcagctttcaatgtggaagatccaaattctgaattctgttgcagggcctgtaatgtccaagttcactactgcttttagggagcttggaacatacaaggaactccttcgttctcaggtaaaatctattctatgccattgaattctttatgtactactccctctgtcccacaaaatatggaatcctggattcccaatgcaaatttagtaataacatagaaagaccaaagtgccctcattactacattcattcatccacccattaattcacacagcacatactataagaaaaaaaaagaggcatctggcacaaaaataagcgccaaaaatttgaaattttctagtacctgcagaaagaaaagagaacatctcccatctgaaaaaaataaatgctggcaagaaatgctcttatttaacctgcaaaaattaacaagaaccaagaacagagaagagaaaggttgtccgccttcaccaaggtggcagtcatccacggtgcgcctaagggcaagaagaattcaatacagttaacaaggtcgaagggcagaaagaaacctcggtggaaaagaagaatagatggaaaaagaatacaaatggggttcattctaatggcacgcttctcgaactcattgaccacctcagtgctgggagatccacgggcgcctccctctccgcggcggcacccgagctgcattccatctaacgtcgttgccagcatcggatttgcctcttgcgaatctcctctgcaccgcatccatccgccaccgatgcagccgtcacatccaggttgcagcatcagggtggacgcataaggtcgtcgggaggagcgagaggggagcgcgagacagtggcgcagtgggcatggggatggagatggagatggagatcgttggagcgccgcattgatgaacgggcgagacgatggtgaatgagagagactcgagcgagatgggtgtgtgcctgggaagagataaggtccttctcgaccaccgatgtgaagtagtcagtcattgaatgtttcacttttttgtgtacagatcgtttttttttctgggaccctcctccagaaatcctttttgtgggacggagggagtaattggcaccctgtgcgctgcaacacgctgatcaattgttaatatgaaaaattagctgggtgatggaacgaaaaaaagagcatagcatagtaacatttttcattttgatacattctgattgcattggtgaaagaatgtgcatttaattttagataaaaaatgcttcctgtccaaatttgaactgcaataaataggactctacataaagattgtccagtttcatcataacataaatgttccatgaaatacaaatcgaagtgaatgtacctccttcaattgcttaatgcaaacacttggaaacaagaaaaaaataagtaagatatattcaattgtttgtttccaaatctgtagttttgtgacaagactcagttgattctgactcaccaaagcattcaacgggaggaagcataggggagaggaatgaggtgggtattatgacctgtgattattgtagtatttgatgggatgataaactcaagcatacgtgcggtacttctctggtagacccatggtgttgggtgtcaaggtgtggaggacttgtgggctacgcattatgccagacatggagcaccagagtgagggcaggtgtgcgctgaggaacggaggaaggcatatagtaggggatggacgctgaagatgcagattaaattcctcacatcctaccttgtctgcaccagtgcggtccactcagattccttgccattgcatcagcggttacagaagaggatgtgatgatgattgattagtgagaggatgagagaatggagcatgtaaggaagcgtggtagttgggccggatcatttgcaggttgatgacttaatcaggaatttttggaacatgtaggttttttgcatggcatatacaaattgaggtgacatggcacgatgagagtagaggaaaatagctttaattgcagttagtgggaatgaactttataggtacataggattctccttctccatatgttgtttcatacgtccatgtcactcatcggtaatgaaattgaaaagtaagattgctgaatgggactaggagttcccttttgatgcaaataacactgtgacactgtaaaagggttatttgcaaagaagaaccgtttttgttctttttatttttactagcttaacagattgaatctctatcattctaatcagtatgtgtcctcaaccaggttgatcatatgcttagtgaacgtttgatgcaattcattgatgtggatttgcatggcgtgaaggtgagggtgacaacctcctgccccaaaaaattaagcacactactgagatctgtatttatgtaggtagtacctcaggttttgctcttcttcatggatacttgcttgcgtgcttgactttttgttggatccgaatttcaagccttttgcttctgacaatgaaaaaattgcatgaagtgatcttagaaatgtagttcgagtttcactgacttccattttgggtaatgggaacaatatatggatgtccttctgtcttaaatacaatacacctgccctactgtcttgatgttcatgtggaagtttttaacacattaattagttaatactataggctaacatcctgcactgtatataggattgtcgtcagcgtttggatagggctacagtggggtatgatcaggtgatatcttgcactctagctatgtgattacctagttttcaatttgcatatttcttcattttggcatgtggtgccctataagaatatatgttgctatcttgcttgtcaggcacgtgaaaaatttgtatcagtacggaaagggactagagcagaagtagtgacaggacttgaggaggtgaacagggacaacttgtttttttttccgtaagtgatcatttatttaatttctatacaacatctctaattccaaatttgcaggatctacacaatgccaagtcagctttcgaacgatgccgctttaacctagtatgtatgaacatttttttatatagtgttgctaattttattgattttgccaagccaataattctccttggctgtaaggaattcaggtgcacgcactttcaaatattgaagcaaagaagaagtatgagttcttggaatcaataagtgcagtgatggatgcccatttgagatatttcaagcaggcatggtcactctataattcgattgattattattgtttggtttattgggttcttcttgattttgttctttatgatctagggatatgaactactgagtcaaatggaaccattcattcaccaggtttagtaatctcttatctgacctattggtcttaaaccgatgaacatttatttcaatcagcatggatccattgaccataagttaaccattaatatgctaactgtaaggttttgatacaggttctaacatatgcacagcaatcaaaagaaatggctatcaatgaacaagataaacttgcaaagagaattcaagaatataggactcaagaggaaattgcgaacttgagaatggctagtaatgtggacacatctaccagtggtgatggtatccatgttgttggtcttcaatcctataaaaagattgaagccctaatgcagtcaactgccaatggcgaggtacttccattatccactgttgagtaaacaatcataaataataggctaggatacctggacggctaagcttgctgcatcactgttcaatgttctgcttcagagggattgatgatgtttaagagcgaagcaccttttatttctaagatggtgattgcttcttcatgtattcctaaattaggtatctaggcaaagagatcgatggtgttatccctttggttcaaattctagtattataatgccctgttattcccatttataattcaccagactacattttaattatatataacatgcaaccttttttttagttaagctttgttgctttctttcactaatttatttttctggcaggttcaaataatcaaacaaggttatctctttaagcgttctgaaaattcacgagaatggaagagaaggttctttgttctcgacagtcacgggactcttttctactacgggaataaaggacaatcggtatgcaataaaagttagcgatttgtgggctgtcatggattgtttaaaatgtattatttgggaatttataccttaattgtgttacataatatacctgaaatattgaacaattgcatgttgtttgttctgtattttatatttatctctttgttcatgtgggaagcaaggagcggcatcacagcaaacagctggtgaagggactggtgtttttagtcgtttcagattcttgaaccaaaaggctccaactcagggtgacaatgcactttcgtgccacaaaattgatctaagaacttcaacaattaagattgatgcagaagaaaatgacctaagattttgcttcagagtaatctctcccatgaaagcatacactttacaggtaattggaacacttttagggtgtgttcggacccaagggttcccaacccttctccatcgtattccgcgcgcacgcttttcaaactgctaaacggtgtgttttttgtaaaaaatttctatatgaaagttgcttaaaaaaatcaaattaatccgtttttgaaaaaaaattagcaaatacttaattaatcacgcgctaatggaccgttccgttttccgtgatcactgttccggggtgggaacgtgttctagcgaacacagccttagtctgttactcggatgtcacattttctgtgacaccaaatttctagtctttgatgatacatgcattgttttatatattaatactatagactttgtcaatcgcaggcagaatctggtgctgaccaaaaggattggattgagaaagttactggagttattgcatcactgcttaatttaccattcccaagacaggtttcgatacttcctatggcaacacttcatttctagtctttcgtgctttttgaagaaaaactttgatatgctacactgcttgcaagttgcatctccattgcataataatcatttaatatagtaatagtgcttgttctgccccttaaaattagctccattttagtgcattttaatcatatattcgagctatcgattgttcaggataatttagtataatcgtatgctgattcagttaatcccaggtgtcgtatggaaatctagaggcggaacatcatggttctgcaaattctgttgattctctctctcttgaggagaacaaaagtccagagggacatgatgatatattcaatcatctcaggaatattcctggaaatgacagttgtgcagaatgtcgttcaccggatcctgattgggcatctctaaatttaggaattcttatttgtatagagtgttctggggctcacaggaatcttggagtccatatttcgaaggtgtgaactctgtcacttgttctttctttttgagtctaatttatgctacttcattgaaagttacgtttttggtgacctgaccctgtctttcacaggaaagcacttcaaaattttaaactcataaaagttataacttagccacggtagtagtataaaactgtaatataatagtggaaccatttaaagtttaatgcttatgctattgccattaatcattactgaaatgattggggcttaatgtaatgttgtaaactttgtcaatgtccaaaacatcgagtaaaaaggaatggtggattggtggtaataaatcaaattagaagcagaaagcttggataagatcataagaatatcgactccaacctctgttaaccttcgactcttaaaatgagatccaggctgtggtaccaacctaggcaattcacagtatctaattcacatgttttatcattattttctgactatatatttatagaaatattaaaaacataattgtatgaaagtgttttttttttcatgaacaatctaccaaaaccattttcacatatcctgatacttatgcatctattaccaactccatgtagttatcagtcacagtttcttgtgataatgctatatgtacttgatataataccttaatgataatttgatggaaagattaactattttattttagatttttgctcatttgtgtttcttgttgtacctttcaattgtattttctaatgcatataagatggtcagagctaagaacattaattttgcaatacactctcttgtgactttgtgatttgtagatttcaaatatcatttgattttcagatttagcagtagtgtggtccatatttaaggattgcttttgatgtacttatttgatgtaggttcgatccttgcgattagatgtcaaggtatgggagccagtgataatggacttgttccatgaacttggaaatgactacactaattccatttgggaagctatgcttccgaaagaagatcaagggtatgttgaagtgtatgtaaatgtatattttcttaactatgttttgccttcatgctttagacaattttcttcctagttacacctctcttctgaaatttgtaagtagtggtatattgactaatacaaacatcagccaatatgctttttgccaaactggaccatgtgtaccaactagttttgtacttctgcatgtattgtttagtcattttattttcttttattttactcattggattattgtcaatttaaggagcataatactgcactaccgcatttgtaatggactatagcattcttgacttaactcagacttgaaatttccaatgggatattctgtcttgcactgaaatggatcagtttcattatggtaggtgaatataatcagtgtagctaaggaaggtgttctatcatttagaaatgttaatgctaataatttcattcacacgttcaagataggttagctttattatcttctacagatgagttggaagatctctcttttaatctgatagtgccaatgaatatatttcatacattaatggcattggcatcagacatgttcattgtgtgtggaaaaactaagtttgctcctttctcctatctattttcttcttgatgtgtatgcagaataaacgagtttaatgatgctattcttttcattgaaaagcctaaacctactgatgctttttcaataaaggaaaggtacatacagacaaaggtaaattattctgtccatccttttatatgctgaacctagcaatgctttcttgatattgatgtatatccttgttagtcatgtgctagttgaagattgaattccaatgtaacccttgccttttattttataaatgtgttgttttgctatccagcttcagttctgtagctacgactcacatgactgatatcacataaatcttttgggaggctggggatgttcacatgcacatatattatatatagttagcagcagttgtatggatcatgggaaatctttatgatgtaaccattttacactttactagcacaatagccatgcgttgcagcagtttatttaatataaaacataattatgagttctcttagtaaaagaatatcttgcctctacttgggtgaagcgatgttcttcatcttaaaaggcaaaattaaaagagtgtagcttatgtcttgctcaaatttcaaatggatggtaaacagaagagagcaatcaaattgctcgtgtggggtccaccaatctcatgggcccacatgttagttggtggtggcggaggcaaactcaccaccaccactatggtcttttataagagcatagatataattggagccagaactcagtctatggattggttcacaaccagatttgtagtttgatttatcattttattttctgactgtactgtttttttgactgaaagtactgccaggtctttgcccagcagtgtgattttcaattattgaaagaataattataggaaataattacaggaagaaacaagagaaaaaaacaaaagaccctataaagtttgtaaccaattaacaacagattgcttcaggagatccttcattctgcagagatgcagaagaatctcatttgtaaagagagacttccaagaatggaactgttgcggtcagggtacaaatactgaagataattgatagaacatgaatgaattgcatacttaacaattaacccttggtatttcaactctaaaacttgcataattgatcaatggctggccggaaaccacaagcttttgtagtgtgatccatatgcaacgaagtgtcgagtaatgcaggctgcaacaaccctcaagttcttttttgcttcaaatagtttctattgctaattttgatagtattaacttcatgtatgaatggaagatttagagctccctgttttcttgattctgatgaccttctgtttgttgtgccatcattaattactgtaaatgatctatgcagtatgtcgacaagcttcttattgccaaagataccaatcaaattaccattgatatattggaggctgtaaggacgaatgatgtgagggcagcatatcgcattcttgtgttggctgatgtgagccctaacatgatatatgatgagttaaacaatgatgttcatcatgatccttcagtaacagatgggaagttatttgatccagcatcttgtgatgtaaaggatgattctgggaaaccagaaggttgtctacaaggctgttccctgttgcacattgcttgccaatatggccattctataatggcagagcttctgcttctttttggtgcggatattaataagcaagacttccatggacggacaccgttgcaccattgtgtccgaaggaaaaatgatgcacttaccaagcatctgctaaagaggtaggattgaatttctagcagtatggaatatagataattacagctatccttccactgttgccaagctgaagtatcgaactctttacataaaggctattttttttttgtttcattcagcataaaagtacagaatgagacactgaggcatatatgatatgttctggggtcctgacaatgtctttagtaatcttatcaatataaccaaaattgtataaaatcaattggatgacttgttcgccaaacacttggattcatactagtcatctcatcccatgtctaaggtccactggtctatggaggtttgtctcattttcagtctcatcatacctatagcgcctatcaggtggcattcagttggttggcataccacttgtgctgtgagttgtgccttttcgagatcatcaatgatgcatttcaacagtttagtaggaacagagagggaaacagcaacaaaaaagcattttcctttcctcaggctattattacaatccctttaatcctgtgtttgtcctcccattttcctcaggacaacaaaaaaaaccaattagtcactgttaatttttgtttgactacatggataatgttaaatggatttctgttccataggggtgcaagaacaaccattaaagatggtggagggttgactgctttagagagaagaatggaacttggagcaataactgatgaagatttgttcattttatttgtaaggtatgatcaagattagtaaaattgcttttcacaatattatcttggcaattactagcaaatgccagtttttcatttccttttcaacgcttgaaaccttctcttgttttcaaaatatgatattgtcttcatgtctgagaaataaaagtacatctcatatgctaaatatttgatcaagcataccctaagtaaacctttttaggagatatcgatctttgcagtttcctgaaatttcatgaagtagcttgtttatgcctgtttcttgaagccttatgttatttctagtcatgaagaattttgttacttagtggtgtaataggaatacttgttaagaaaaagggtctcatttggggatggtgtcttcccgcttatgtgggttcaatactgacgttttcctagcatgaacatattagtgtatcttgatatgtaccagtaattgattgtagtaattaactttgttgcaacttctgacattataacggacatgcttgtgcaggtgaaatgtcaagaacacaggtttgtagtaagcaaatgtctgtatctgatagagttgtaccagtttttttagtttatatagaatgaatacatttgtatcttattacggtgagataaaatctctgacggtctgacctttgcgcttctgtcgtgtactcgtgtgatcttgccagtcttctcagatcactctttgtacaacagttgtagcatagcatatagcatacatcaatcattcatataccaaagtttgtatcatttcctccatcatcaaacatgtaataacacgttcgagcaatatacccgcatgccattatcgtgcgattttgaaatccacttactaattgctgccatgagttgtttgcagttgtttgtttcatctgaacctatcaattatgtgtgtatcgttagcaacttagcatcgccctgcggcactgatgcctaggcctgctggatttttcacattttggtctttttgaaaaacttgtttcgcaagtagacccctagaaaaacttatcccaaaaatggtcctttttggggcgccagagtggctggcgccagcctctttggcgccgtccccctgccgacgtggcggggcgatgctgaggtggctagggggagtgcgccagagtggctggcgcccccccccctccccgaaattttttatttttgttttatttgtttgatatttttttcacgcttagggacacacaagaaccaaccatagaaaaattgaacttaaatggacgtaatatgtgacatgtagaatttttcctctcctctctccgaactagtgcagaggagagagatgtgcaacttttttatttttattttatttttttgatatttttttcacacttaggaactcacaggaaccaaccatgtaaaaaataaactcaaacggacgaaatatgtggcatgtgaaattttccaaagctctaccgaaaaacttctctcctcgaaaacacaatcttgcaagcggaatttggaggttttaatatcgccgaacccagcaaagctgaggagaatcggatgtaactttttctgtagatgtccatgcatatattatttgcctgattccgagtccgtatgagaaagttacgcctattttaatagatgacatattttgtccgtttcggtagagttttggaaaattctacatgtcacatattttgtccgtttgagtttattttttatacggttggttcctatgttctcctaagtgtgaaaaaaatatcaaaaaaatgaaacaaaaataaaaaattatatctctatgtactgtttaacttatatatgtcatttaatgtggttatattttgaattagattaagtaatttcatatagtggtagagtgcattatgtttaacatgctgatcaaagggttttactaaaggagttatggtctaattttagtgaaggtgcaaagtagactaagtgggtatgctagatattttcagacttagctaagtggtagttcgagtttaaattttttttttgtggttggttgtatcgtgatcctgagtgtgaaaaaacatccgaaaaaataaaataaaaatgacaccgttgtaactccatacagaaaaacaggatggaggcggcggcgccagcatgctggcgccctcctccctggggcggcgccagccatgctggcgccctcctcctgccacgtcggttcacgtgcgccacgatggcaggaggacggcgccagagaggctggcgccgtcctgttggatgacggcgccagccactctggcgccccaaaaaggaccatttctaggataagttttttcaggggtctatttgcgaaataagtttttcaaaagaaccaaaatgtgaaaaatccagcctaagcctgcgaggctgcgaccgcctcctcgagcagcatgatgatattgctcggctcgctgccatcgcacggcttgttccccttaccgttttcggcgtggttatcggaccccacggtaaagtggttaccttgataaccgcaagatataccgtggttttaaaaaactttatgtattgtaaccgcgataaccgttaagtaaccgcactgttttgtaaaccgagggaacgatagccgtacagcgtggacgaacgcaagtatctgtacagaaacgcaaacagagatcgacgaagggaatgccaaacgcccagatctgggaggctacgacctggagcgcagatggtgtttgtctctgaaacagaggagaggacgagtcggctcaaagcaccagagagaaaaactaaccacaggatggtggcacgctcgtggtcgtgggcgcctgggcgacgaacgtgcaagctggagtatgagagagcgagccatgaaggatgggcaggccgcactcacgggcacacggcgagctgcaagcctgcaatgcctgcaaggctgcaaatcagagtccacggagctacagcgtgtcgttagagcaagtttaatagtatagcttactgctagctctaattcattatatccaatctaataggcaattcatacaatagttgcttactatattattaatatattgttccatctatcatacacacattgtgttttggagtccgcgctgtagctggttacaaatctgtagtccgttgctcttctctctcatattttatctcgttaaaatatgtttacagctggctaatagattgctattgtatctgctcttatgcatgatcgccattgttcccagataaacagaggcattacccccacggctcgggatctctactacacatttcagcatagcaaagcgccaaagcccattggccccaccggccaccgcgcataagccctcgcaacaacagccaacttgaagcagtggagctcaaaattcgttccgattctaggggggatcgagcagcgagcggactcccctcgcttaccgccgcgcttggccgccgccgagggacggtggatcgcggtgtcgggggactcggcgtgaggggaagcgggaggcgtggtccacctcgttaggccggtgcctactcccagcgacggcaccgccaggacgacgcgccgccgtgatctcggcggctccggacctccggttgtcttctcgaaccgatattggtacgcttccttctcaaacatcaatctccatgcctcgttgatgttttaatctgctactattattgagtattacctccgtttcaggttataagactttctagcattgttcatattaatataaatattaataaatctaggcacatatatatatatatgtttatattccctagcacagtgcctgtgcgttgccacgggtgaagtcaattttgattttacatatatatactctgtacatgcacgttagtagataaggaatcgaaagcgatgacatatcaaccgaaagtgactccactaaatcgaaccttctattgttgtgcaacgaattgacactcactacactcatacctaattgtttgttgttttaaatctactcgatttatgattataagaaagatattgataccaccttaaaataaaattgtttttttactgactcctatatttatggctacaataaattatttatttttttaggtcatgtaatattgtccatatcatgtatgcccgccgtcctcctcgtcatcgtcgtcgttgctgtcctcgtcctcgtccttgtcgtggggggtagtgggctaggggtggctgggtccaccagctcccttcaccatcgacgcgagggagggggagttgaatccgctgcccccatgcttcttcattaccggatccgttgctgccgcgcatccccactaccggatccgctcgatttatgattataagaaagatattgataccaccttgaaataaaattgttttttattgactcctatatttatggctacaataagttatttatttttttaggtcatgtaatattgtccatatcacggatgcccgccgtcctcctcgtcatcatcgtcgttgtaaccgtcgtcgttgctgtcctcatcctcatcctcgtccttgtcgtggggcgtagggggctaggggtggccgggtccgcccgctcccatcactgtcgacgcgcgggagggagagttgaatccgttgcccccgtgcctcttcaccatcggatccgctgttgccgcgcatccccaccaccggatccgccgcagtcggatccgcgcgggtgatggccgccgcacctccccaccgtcggatccgccgccggacgcctcaccaccgccagatctgtcgccgctgtcgcatccctcctccgccctctcccactgcccgagccctccaccgcgtcgggaggggggagaggggagagaaggagtgggggagaagaggaggaagccatcgtcgtcgcccttgcctaccgctgggagggaggagatgaatgggggtgatgggaaagagagaggactggagaataaaaaaagtgagaatctacgggggggtatttttgcatgccggtgagttaaacaccacattttcacgtccatatattttaaatggtccgtttggaaaaaatgattcttgcatacaagtttcttaagaagccgtatgggaaaatgggataaatttttgtaggcacaaacacttatggcctgtctgcaatctattcgggtggtcatccagaaaaatattttttaagtagtgaatggaaagatgacatgatgaatccaacctcattttttcgctcttggctacacttaatgctatgtatttgttggtgaattaatgttatatataaataaattaataagttgtaaatgtataataaaatttcctaaatataaagcatggatggatttaattctatgcgtggttaattctgctctctggaatttttctcggatttttcaaagctcaactactaattttaataatacaaagaacgtttcagtattatttaaataataaattaatcattaaatgatctggttttaatgttgttatccaagtatgttcaagagttttcttgatattatttgagcatttgaaataattttaacaatttaaagatcattttattggttaatttatctggagaagtaattaaaaatcccctctctttcttgggcctaatccgtgaagtccactttagcatcctacttcttcctgttcggcctagtagctgcaccgctaaaagtttgtttcacgtccttccttctttttttctcgggctaggctttttttccccaaagtccacatctcatccctgtcgctacagtgttgtcttcaacctctggccggagacagaacccgacccggcgccgctttccactccaaatccgggcgcccctttctattttttccaaaattggttgaggggaaatatttcccttatcctcctcttccgttttccccaagaatcggaccttatcccggagaaattaacgcggaatcgagctcggttcgagcttatctctccaaatagaaccctagtttttgtgaacaaagctgaaggcgacggtgacggacgaaaaacgtgggttaaggatgtgacgaccggaaaaatatgaatatttatattagttatagatatagatatatctcccatgctgattttattatttgtgtggccgtgagtcaacctatgtgatttgtatcagtctggattagagtccgatcgatttgctgacatatcgatgcttcgatcttttttccggctggtgcgtgcgaacgactcgtgagggaggatgtgaacacgcgcaggtattaggggagaagtcggacactaacacggacccgattctgatgcgcacgaggtctggattagagtccgatcgatttgctgacatatcgatgcttcgatcttttttccggctggtgcgtgcgaacgactcgtgagggaggatgtgaacacgcgcaggtattaggggagaagtcggacactaacacggacccgattctgatgcgcacgaggtctggattagagtccgatcgatttgctgacatatcgatgcttcgatcttttttccggctggtgcgtgcgaacgactcgtgagggaggatgtgaacacgcgcaggtattaggggagaagtcggacactaacacggacccgattctgatacgcacaaggtctggattagagtccgatcgatttgctgacatatcgatgcttcgatcttttttccggctggtgcgtgcgaacgactcgtgatggaggatgtgaacacgcgcaggtattaggggagaagtcggacactaacacggacctgattctgatgcgcacgagcgggcgagagtgcgcaagccgagtaggaatcgaagtcagatgacgtacgaaacatctggcaaaaacatcttaaacttttataataggtaaagattaacatatacttcctccatcccaaaatgtttgacgccgttgacttttttaaaaatgtttgaccgttcgtcttattcaaaaagtttaagtaattattaattcttttcctatcatttgatttattgttaaatatacttttatgcatatagttttacacatttcacaaaagtttttaataagacgaacggtcaaatatgtttaaaaaagttaatagtgttaaatatttagagaatgagggagtatatgaatgtgattccggtaaaaaaaaataaatgtgaacaatgctagaaagtcttataatatgaaacggaggaagtactgcgtaagcaactggaaatggagttatgaaattattactgaatggatctgttcatgattatacaaatttttgtctttgccacctggccttaattaatcccttacaaccatatattcctcacaaataatgatagtaatatacaacaggcgtgggctatccatacgtactgtaacctaaaattacacacaggaaataaaacaatacagcataccctgttcagaacggaactacaaagcatatcagatatcacttcaccgtggtatacctaattagcgtggcaaactaattgaagatgataattcttgctccagactgtagcaaccagaacctgggattccttcagatgttaaatcaccagcatttgtataaatattctgtgcataagagttactagtatttgggcttaaaaggtgctcgatttctccatcatttcctgggagcagttggaattttcttagcctcttagttttcaggaactgcagcctcatctctacttctttcatagtaggtctatctactcctttaactttcaagcatgccattgtaagcgaggcaattccatcgatctcttccttgtttgcctcttcaacaacctgaggatctattatttccattagagagccctcttgaagtccttcaacgaagtaatgagacaagctttgttttgcacctgcctcattaatgaaaattggtttctttcttattagaagttccacaagtatcactccaaaactatatacatcacttttttcagttagttgtccagtatgataatactctgggtctagataaccgaatgtgccttggacaatagtcaccacatgagtttcatcaagtgaaacagatcttgaagcaccaaaatcagagacctttgtagtaaagctgccatctaagagaatattggaagatttcacgtctctatgaaaaattggtattgcagcagctgaatgcagataggaaagtgcccctgctgcttctacagcaatcctaatgcgatcatcccatgacagcgagcatctaacactaagatcggtatgaaggtggtcatgcagtgtgccattcgatatgaattcataaaccagcagtggcacctcagattcaagacaacaaccaaaaatctttaccacattgcggtggataatttgagataagataacaacctcgttgataaattgatctatctcagtttgctcaacgatttttgattttttaatggccaccacacgctggtcagatagaatgcctttgtaaactgtgccatgtcctccacgtccaagaacacgagttccatcaaagttgttggttgcctcctctagttcttccaaggaaaatatcttcgttttgtttgtggcgctttcatttgagattagttgctccaagagtaggccttgatttttcttgaaatatgctctccgtattctcttttggatgcctttcctccacttattggcaagtatcattgcccccaacacgataactatggagccaagaccacaaccaattccaattgcaatacctgcatcaattcattttgtcataataaaatcattttgcatgttggctattacttcttacggtcttacctaaaagaagattgcgttgctttgctgatgtaacacacttctttttgattggatcaaactcttttctatgcgggcagcttgtgcatgtataatttccaagtaaattttgacacgtgccattgcaatagtttggcagtaagcattcattgatgtctgcaaaaaactatgattagtttgtcgattctcccaagttaaattgatataattcaatttctaaacatttgcaggcatgagcattgctggtgcacactggaggaggtgtgaagaggaaataacctgtgcagccatcctcgatgtatgggtttccttcaaaaccgggagaacacttgcaacgatatcccatgaactctttcctgtgggtgacgttcaggcagtagctgtggctactgcggcatgcgtatgtagtgttcttctgcacagctacttcacaagttaagttggtaactgcccatcttataacaatggcgtattccatagagagatcaaatctatcttccacagggcctgagaatgaataatcacggccagtatctgtggtctgaacaattatcgcctctttctcgtagtttgtgtcattcatcatgtttccgacagttagagtcccatcatccaaagacacagcagtcacatgatattgtgcttctcctaattcgcaaacagttaggttaccttctgtacaattaagtctaaacctttcgttagcaaaacaaccttcttcgactccaaaagggaaaggaatcttcatgtctccacaggatgttgaacagtgttctttatatttggggttgtaatctgttccaccatagaaattacaatatataataagaataagaaggaggttagtgacagtgcattatattttgcttcgttttgggggtaaaaagggggcaggcaggaagtacgtacccgtgcatccatctagaaggtaaggattcccctgttcataaccagagcagtaacaatgataacctccagatgacacattccggcaattgctgccagggctacacgcataacttgtgttgttcatgcgcgcgcgttcacagcttggttgatctatggtagcaaaagaaagtactgtgccttcaacattacttgtgtttgtccaacctaagaaaaggtcacttgtgtttgatatataatagtccgatgacatgaaagccatgattccagggtgcactggatctgtttgtgctacaggaatgccatccgaccgaagaattatggttgactgaaagccccgcaagacccttggtaactcgatgaaacagcatcccatcccattacaaggccctcctattggtgccttttcaccatcacatctactcatgcaagaacctatgaggtcctccgtgccatactcgaacaaggtagcatcgaaattacaaccgataacgtaaaatgtgttgtaatgatcaatagtaataccctctgttggggccacccaggatatgttgtaggtatccgtacctggtctcaccgtaatgttgaagtatatctgggccaaaacatacctataacccaagtctgtgatctcagtagtaccatcacccagaaagagcttaggagttttggcggtgttgcggcagatgagctcgaagccttcccggaaacagcccggcgctatcccgaaggggtagtcgatgccaacatctccgcaacgagaggggcaatgagccagggaatcattagaagggatagacaagagccctccgccaactccgtagactgcagccgatgctggggacgtagcagccgagcacagcagcacaaaagagacggcgcaagctgccactaataagctcgagctcatctttgcgccgatcggctagcttgcctagctttgtgggtgcagatatgtatgctaactacgcgtgagatcgattttgtattcagaggcaacgtctgtcgtctcttaatttatactgatcgtgcgcctgcagagacttaagtaaacgcaagattaagagcgattccccaagcgctatataacatatggagacattgattgatcagtatttcgatcagcagcaaacagttttgttgcaatctgccaagcctgtatattgtcctcgtatatgaacgaattccaggggcactagtcccatcagatatccctgtcgttgctggagccaacgactcgcccaactgccggtcgctgctcactgatcctatacacatctgattatttccacacgtccatggctatctgactatctaccagctggaaagaatggtactgtccggatgctattaatcacaacacacagtaacaaagcaatacacatgctactagatgacgaaaataatggcctgcggcgttgccaaactagagactgtagaagattcaatagtagatttttgtaggttcttttctaatgaatccttgaaaggaagtaacatgtcaagtcggtcgatctacactgcagttagcagtactctgatgtttctacaaactggccaattcgcccaccatattcttattgaaataattattcgataatcttgttatgcaaaaacaaaaaatgacaagtaatggggtggactgtggagtgaagatacgtacgtgtagaaattaaaggtgataaccacagatggaagaaatatatatgtggttgagagatgaaatgaggctgtgtttagatccaaagtttggatccaaacttcagtcattttccatcacatcaacctgtcatacacacacaacttttcagtcacatcattttcaatttaaaccaaaatccaaacttcgcgctgaactaaacacaacctgagtctaatttaggtgtgagtttgtttattcgtgtatgtctcaaactcttttagagctgtcaaatttatttctaagcatttaaaagctctgcattaacttttgaactaagacttcgagggaatgactacggccggccgtgttagaccaggtatatgcatgcccgggtgttcacggtaagatgacctcgcaagtcgaaatcatttctaccaacatgttcttcggcggtgactacgtacagctgacaagtacgtgacattttcctccccgacaagctagcgagatgatgattggaacgaccggtgcacgtgcgaaacgtttctggtagatgactgggaatataaattattcatacaagtcaattccgatctgaacgaaggacaacccacaaattatggaagtggtgtaataaatctggatcaactctgaatttatattgcaatcagttctgcgatctacacttatctatatgatctacacttatctatgtagtacgatttattttatctacaatctgaatggcctcgtaatttctggttcccaattttaagccatttttgcccgaaatcgctaataagcgactagtcgcgcgtgtgagcgcgcgcggcgagttcacccctactacttctagcctaacactgtttctataaacccacgggtctctgttttttgggcttcttcgtgtcgtgggctttcctgaaatgggctaatagccctcccgcgcgcgacacgacagaggaggcggcggtcggcgcgtatgggcgtacggtttcccttttttttgtttttttttccgtatcttttccggttttatttttttccttttttttcttcccgtatatttttgtgtttgtccgttttttaatagtatatgtatgctaaactctgtgtacgtataaatacaaactttatatgcatgtatacaaactttgtatatacgtatgcaaacttttatatacgtatatacaaagtttgtatgtgtattttttggtttttatacatacgtataccaactctgtatacatgtatataaagtttgtatacacatatatatgtttgtatacacttattttttaggttttttatacgtatacacacaaactttatatacatgtgtatatctttttatacattaaaagtgcatacatataaaaaattatgtatatatacacacgtatgtataatatatatgcgtataaactatatatatacatatgtatatacatatagtacgtatacatatagtacgtatagtagtatatataggataacagatcacactagagggggggcagctgatcgcgcgcgcggggcctcgcgcgactggtcgcggatcagcggcccccacttttgcctacgtgcataagcaagtatggcgtgaattctcgatcttcttcccggcctgttagtttttgggcctcaagaagcccaaccacgtgcaacgggagccctcaactctggacctcaagtccaacatcgtccagggcagcaacatccatcccctcggcctcatcgcggcagcgccgctcgtcgccctcccctcagacctcaccgccggtgcgcgggccacagttcatcgcaagcaactaagccacagcctcgggagggagtcggggggaagggggcggcgccgtccacctcagcttccagcacctcctcatggcggaggcaccggcagaaggccaggccgacacgccgctgtagctcagcgccgattaatttcctgttcgaaatcggtacgctccctcgtcaaactgcaatattattattgctcgatgcaatggctgcttttgtgtgcgtatataacaagctctggttcgaaacacactctgaagtaggagtggtcattagtaaaattatattttgcgaccggaggcacgctgaggagatgccctaagagtgattaaattggggttgttagcttaattaattagaggatatttgctggatttgtcaccgtatagggtcactatgctcgtcttgtaagctattacgagcagattcgtaaatataatcccgcagactgcagttccctatgaaaacattggggactcatgatttcaacattttttgagtgaaaattgggctattgtcattaaaagcaacatctaaaatgacaaattaatttcattaaatttagcatcgagtatattttgataatatgtttcttttgtattgaaaatactacactatttttccataaacttaatcaaacttaaataaatttgactagaaaaaaaatcaaacaacttataatataaaacggatggagtatattgcaacttctaagaatgtggtactactatatattatccttgcaaaatctaaagccattgcagggaccaataaactcgcccgcccattctttccacaaatccagtaccagatggaaagagttgcaatgtgcaaatcctaatccctgtacatatttttgatctgttttttcttcatctctataaatatatgaggcaaagcttttgccctcctttcaaaaaaaaaaagtgcaaatcctaatcaccatacactagcgtgatacaattgccacagtcttctaattcatatagatgaacaaaagaaggccggcaccgttgcctaagtaggattactgtagtacgataacgccgcatacacttttgtatactctttgctctctacgtacagttagaagctctgccctacaagttaattagcagtgtgtttcttctatgcaggagcaagccaacattggtgctctaatttatgagacggcggtggcgcaacatgagcaaagagcgacatgaaaatgacggacacaatcacgacacagcggcacaagtgcaaagccaaacagagaccgcggtggagttgcagggtgtttgccgacagaggcccagtgtcagagaggtgtcgaggtgtgggggcgaaggggaggcctggtccgccccggcagtagggctcctcctcttccccggcgcgatcagaaggctggtgcctcccccaagcgcggaggccggcaggccgccgctcccggttgtctcgtctgttcgaaccgaatctggtgcgctcccttgtcaaacggcaatctccactgttttgcttggtgtgtttgtggttgtgtgcataatctaggttggagttcttttttttagtctaattgtactggtatggttaactccatactcaaattatcaccactggtaaactaaactgtcttttgcaaagctacagaatttggagccatagacaatagcatttctgtttgcagcataggtacttactactacttgtggtccggtttgctgggatagagatttttttttttagagaaggggaaattcgctccataggagatttgaactcaggaccttggggtactactcaggtcactgtaaccactaggctacatgccctttcgttgctgggatagaaatggtgatggggtgtggagtgtggactgattctaacccttcacttttttcccctgatcctcaatcaaaccataaattagatttcctctatatatccctattcctgtgaccttatcccaccaaatccaaacaattttacagttcccattatgaatgcagggtttttggacaagtgatgaaataaaaaatttgaaccgtgccatttatactttgtgtaaaggcattcggaacgttctctgagttccaagttttgacttccgactagctctataatggctgtgtttagatccagacttccaactttttccatcacatcaacctatcatacacacaacttttcagtcacatcgtaccaatttcaacccaaacttccaactttggaaggaactaaacacagccaatactccgtattaacgatgtcactgctatgtggaaaaaaagatccagcatctacaaactgagttatcagtcagatacctattggtgacccttactgagcaagacattggcaatggagtaataaaattattactgaacttgttcactttgccactgtagcttaaatacaatattacaataccatgtcattccttacaaggatattgatcacaaataattatagtagaatacaactgtcattctatcaactcacatgggctatgcatacatgctgcaagtatacaggaagtgaagcatgcaaaaaccattctctggagtgaactacgtaacataacacttcgtagaaaatatgtgataactcaacactccatgttacatatatagctagcgtggcaaactgactgaggatgataattcttgctccaaactgtagcaactggagatcccttcatatgataaatcacctgcactggtatagttgttctgtgcttgggatttaccagcatttgggcttaaaaggtgctgaatctctccaccacttcctgggactgggagaaattggaattttcttagcctcttagttctcaggaattgcagcctcatctctacttctttcatagtaggtctatctcctcctctgagtttcaagcatgcctctgtaagtgaggcaatatcatcaatgtcttccctgtgagcctcttcaagaacctgataatctattatttcgataagagatccctcacggagtctgtcaacgaaataatgagacaaactttgttttgtgcctacatcgttgatgaaaattggtttctttcttgtcaaaagttccaccagaatcactccaaaactatatacatcactcttttcagttagttgtccagtatggtaatactctgggtctaaataaccaaatgtgccttggacaatagtcaccacatgagtctcatcgagtgaaacagatcttgaagcaccaaagtcagagacctttgtagtaaagctgccatccaagagtatattggaagatttcacatctcgatggaaaataggtattgcagcagccgaatgcagataagcaagtgcccctgctgcttctgaagcaatcctaattcgatcatcccatgataatgaggatttaacactaacatcagtatgaagacgatcatgcaatgtaccatttggtatgaactcatataccagtaagggcacctcagattcgagacagcaaccaaaaagcttcaccacattgcgatggataatttgagataaaatagcaacctcattgataaactgatctatctcagtttgttccacaatttttgattttttaatggccaccacactctggtcagatagaatccctttataaactgtgccatgtcctccacgaccaagaacacgagtagcatcaaagttgttggttgcctcttctagttcctccaaggaaaatatccttgtttaatttgtggcgctttcatctgagattagctgttccaagagtaggccctgatttttcttgaagtatgctcttctaattctcttttggatgcttttcttccacttattggctagaataattgcacctaatgcaataattatggaaccaatgccacaagtaataccagttgtaatacctacagccattcattaattttctgccgtgaagccactttgcattatcttaaggcaataagattgactaatctgtcagctatgacttacctataataagattgtgttgcttagctgatgcaacacactgtcttgtaattggattaaactcttttctgtgggggcaactagtgcatgtaaaacctccaggaaaattttggcatgtcccattgcagtagtttggcagtgagcattcatcaatatctgcaattaactcttcagttttttttgtttttattggtacaacgtatagacataggctaggcactagtacagccttgttcggttagagagggattggaggggattaattccaatcccgcttgatccccttgtagatgggattaaccgaacaaggctaaaggggaaatgccatggttaaactatccacataaaacttctctaaaattcttaaacaattgcaaataggaggggaatgaacaggaacaaacctttacatccatctcggatatatggatttccttgaaaaccaggaagacacttgcaacgatatcccatgaatatgtttgcgtgggtgacgtttaggcaatcgctatggatactgcgttatgcatatgtagcattcttttttatatcggtatcacaagttaaattggctacggcccactttataacaatgttgtattctaaagagaagtcaaatcgatcttcaacaggaccataaatcactgtatcaccatattggtcaccttgagttattagtatctctctcccatattccgtattattcaacaaattacttatagtcagagtcccatcttcaacagacacattagtcacaataaattgtgcttcacttgtttccaaaactgtgatatgatctgatgtacagtacaattaagccgaaaccttttgtttgcaaaacaaccttcttccagaccaaaagggaagggaatgatcatggttccgcatgatgtcggacagtgttctttatgcttggggttgtaatctgtcccacaaagagagtgacaagggatgaaagttagatatatatcgatatatgtgtcttattttgcaggaaattaaaggtggtaggaagtaccttgcatgttgcatcctcccaaaatgtaaggattgccttgtagataacgattggtgcactcacaggtgtaacctcccgatgatatattttggcaattgctgccggtggtacaagcataacttgatttgtttaccagtgcacttccacagcttggttggtccgtgatggcaaactgaagctcggctccctcaacgttgctcacattcgtccaactcaagaaaagatcactcgcattacgtacgtaataatccgtatatgacatgaaagccatgatcccatgatgcagcggatctgatatttgtgctgcagcttcagcttgaacaagtgttgactgaaatccccgcatgtcccttgataacttgatggagcaacatccgttcccattacaaggctgtcctattgctattggtgccttctcaatgtcacatctactcatacaagaaccaacgaaatctcccgtaccaaactcgaacaaggtggcatcaaaattacaacagacaacatagaaagtgttctcatctgaaattttaatacccttagctggcgacacccatgaaatgttgtaggtgtccataccttgccttgtcgtaaaattgaagtacataggagccaaagccatgtcatattccattgctgttatctgggttgtactattggcaacaaggagcttgggagttttggtggcggtgttgcaggtaagctcgaagccgtcccgaaagcagcctcccccaatcccgaaggggtaggagatgccatcgacttccccgcagctagaggggcagtgagcgagggagtcattagaagggacaatcaagagccctccaccaactccatagactgaagccaatactcgtggcgtagctgccgagcacaccagcacaaaagaagtggcacaaactgccagaaagctcgagctcatctttgcgccagccggcttgcccttcctggtgtacgtaggccggtgcctgttaactaccgatcaatttatattcagaggcagccatctctttgtgctcacgctttcgtggactttataagtatagatgccagattaataccagccactccccaagcgctatgtataaaacatatatggaggaattgattggcttatactcgatcggcagaaaacaattttatcgcaataatttgccattgatcgacgaagtccaggggcactagtcgcatcagatatcccggtcgttgctggagccaacgactcgtccaactgccggtcgctgctcgcttctacgtccgattttctcctcgcgtccagtagctatcttccaattggaaagattggtactgcccaggaaggctaattaataatcatatatatactccatctgtactaaaatatactatctccttccttaaatgttcgacaccattgacttttttaaacatgtttgaccgtttgtcttctttaaaaacttttgtgaaatgtgtaaaactatatgtatacataaaagtatatttaacaataaatcaaataataggaaaaaaattaataattacttaatttttttaataagatgaacggtcaaacatttttaaaaaagtcaacggcgtcaaacatttttttgatagagggagtaagagattttaatcggataaggtatatcttagctagtactcatacagatgctaccatcttacttcattacagatgacgaaaataattgccggcattgtgaaactagagaggaaaaaaatatgaattaccccctgaactattgcactcgaccaaattacccacccacccaccccccccccccccaacccgaaaaccagacattcgatctttcaataccgctcgaattacccccacgacccaatctagagcgattttgacatacgtgacatacgcgtggcattccagtcagtattttatttatttaaaaatatgggacccacctgtcatacctcctcttcccctcttcctctctctctcttgcgcgcatggcatgcacggcggcgcgaggacaggcgatgggtggggacgagggagtggatgggaggggggagggggagtggaggtggatgggaaacgggaggagatggaggtggaaggggaggtcagcgcgcacggcggcgtcaccgggatccgccattgatggggtggaaggggagggagatcggaggggaagacgaggtggcccccgcctctggccgccacccgcctctccgccacgacccttcctcaccaccgcctctgaccaccgtgcgcctcttcgccacggccctcaccgtgcacgccgacctccccttccacctccatctccacgctgcttctgccactgtcccgtagcgctcaccgccagccggagccacccagctcaggcctccacctccgcgtctcgtgccgcagcccacctcctgcccctgcgcgccgcctcgtgagagcgagagagagtgtgaagagagagagaggaagaggggaaaatgatgtatgacatgtgggtcccaccattttttaaaaaaaatgttgatgggattgtcatgcgtacaccacgtaggacaaaaccgctctggaatgggttgagggtgttaattcgtccggtattaaaggtttagggtaagcaatgtctggcgggttcagaggggtaattcgatcgaccgcgatagttcagggataattcatctttttttccaactagagattgtcctacaagacatgcctatagacttttgcacaggctcttctgatatcttccaagtacttcatccgttttatattataagactttctagcattgcccatattcatatatatgttaatgaatatttcatattataagaatttctagcattgcccacattcatatacttcctccgtttcacaatgtaagtcattctagcatttcccacattcatattgatgttaatgaatctagacatatatatctatctagattcattaacatcaatatgtatatagaaaatgctagaatgacttacattgtgaaacggaggaagtatatgttaatgaatctagacatatatgtgtctagattcaataatatctatataaatatgagcaatgtttgaaagtcttataatataaaaagaagggagcataattcttgaaagaaagcaacatgttgaatcattctacacttacttagcgctcctttgcttctacccaactttccaattctcccactatattcttacttaattagacttttcgcaattcttaatatgcaaaacagggacaagtatggtgtggaatgaaaataaggcaacgtagaaattcaaggtgattgccccagataaaattaatatatatgtggctgagatgaaatgggtctaatctaggtgtgaacatgttcagagtctggttcttcacgtgcatgtctcgttcttttagggctgtcaaatttatttttaagcatacttgtatatagttactatttcatccaccaatatggggctactatttcgacgtaaccaactggaatgtgcagacagagatttcatagctaagcaagtccacgtagatcgaaagcataagcatatttttagctgaaaaccttcaggagctctgcgttaacttttgactatggtggtgtttaaatctcccaaaaatggagatgagataaaaattaagtgtttcacgtaaaatgatgtggtaataatgtgtcttttaaaaaaaagtgataataatgtgtgattaattgagttttaatttttataaacttgaaaaataatcttatattttaaaataactttcatatagaaagttttcacacaaaacataccgtttagcaatttaaaaaacgtaccatttttatctaaaagtttatacagtttttttgagaaaagaacaggacatagatgcacggctccacgccgcccgcagcatggcttaaacaaaacaacgttaaacacatgttggtcactattaaccaaatcttcctatctagcttattttaggttattatatctacacatatcataaattaaagcaactgaaatgtactggagtagaaagagattagaagcggccctgtttggatcagggactaaaacccctatcacatcgaatgtttaaatactaattagaaatattaaacgtatactaatgacaaaacccattccataactttagactaattcgttcgacgaatctaaattaatactccctccggttccatattaattgacgttttggacaaggctgaggtcaaacttttataactttgaccattaataactttaaaaatatttagtttaaaggaactagaacaacatatatagatttgtcttttaaagtactataataaaagtaaacatgtatttatttattatatatattataatagaaaaataaggtcaaagatatatcttgtagaccgtgtcattgtccaaaacgtcaattaaaatgaaaccggagggagtatatgattaggctatgtgatgctagagtaaacatgtgctaattatgaattaattaggcttaaaaatttatctcacgaattagctctcatttatgaaattaattttataattagtctatgtttaatactctaaattagcgtacacgtatccgatgtgatatgagtatccgatgtgataggaataaagtttagtcatggatccgaacaccaccgcgtagctgagtcagtccacataaatcgaaattaaagcatgcacctctcgaccagctggaatgacaggagaaacttttttagcctaaaacatttagaagctctgcattaacttttgaattaggacttcgagggaatgactacggccggccgtgttagaccaggtatatgccctggtgttcacggtaagatgacctcgcaagtcgcaatcatttctaccaacacgttcttcggcactcggcagtgacgactacagttgacaagtactacgtgacagtttcctctccgacaagctagcgatctgaacgaaggacaacccacaaattatggaagtggtgtaaatcttgatcaactctgaatttatattgcaatctagttctgcggtctgcacttctctatacagtactattgtgaatacttttgcattggcgtgaattctcgatcttttttccccggcctgttagagtttctgggcctcaagaagcccaaccacgcgcaacgggagccctcaactcttgacctcaagtccaacatcgtccgggggcagcacatccattccctcggcctcgtagcggcagcgccgctcgtcgccttccccctcaccgccagcgcgccgcagttcgagaaaatagacatttagccactttcaaaaagcggtttcgctggaatgccattctgaaaatgcgtttcgctaaaatgccaatacgaagcgtgtactcaccgccactttgccatttttaccattttgtgtattttcaattgtattttcggcttgatggtaccaaattgccccttgctagctagctgaaagggatcgatccagttcatgggagaaagaggacgagcgtggcgaggtggtccatgacggcggcagcggcgggctttgtcgcccgcgtgtagaggaaggtccagggctccggcgactgggatgacatgctcgccgctgcacccgttgctccgcggagaggtggcgcggtacggcgagctcgtcggtgcatgctacgcggcattggaggacccttcgtcgccgaggtacatgaactgcaagtacggcaagctccggatgctggaggacgccggtgccgggtacgaggtgacgaggtacatctactcgtcgccggacgccgctgtgccgggcatggaggtgtcgaccagcggccgcgccagctgggccgggtacgtcgctgtgtccaccgacgagacgacgcggcggctcgggcggtgcgacgtgcttgtctcattccgtggcaccgtcacccccgccgagtggatggccaaccacaggagctccctcgtgctggcgcgcctcgccccacgccgcggcgacggcggcggcggctacgtgaaggtcgagtcggggttgctcaacatctacacctccgccgacgagacatgccgcttcggctgcaccgacagctgccgcaaccagctccttcgcgaggtgtcccgactcgtcgcctcccgctccggtggtgaggacgtgagcgtcacgctcgccaaccacagcatgggcggcgcgcttgcgctgctcctggcatacgacctcgccgtcgccagcgtctcggcggcgacgccgccgccgcccggtcaccgtcttctcctacggcgggccgaggatgggcaacgcggcgttcaaggcgcggtgcaacgagctcggcgtgaaggtcctccgcatggcaaaggggaaggcggcggctgtggaggaggaggtgaacgggttttttgtggaggaggaggggacggcggtgtcggacgtgtcgttgatcggggtggcatcgtcggacagctcgacgggagaactcgtcgttggagaaggaggggcattctcgtctcttcaagccgctttgcagagaaaataatatccaaaatagtaaaaatggagaaaatggcaaagtggctgtgatggcgcgctctatatttgcattttagcgaaacacgttttcggaatagcatttcagcgaaaccatgttttcaaagtggcaaaatgtccattttctcctgcagttcgccgcaagcagctagccacagcctcgggagggagtggggggggggggggggaaggggggcggcgccgtccacttcagcttccagcacctcctcatggcagaggcaccggtagaaggccatgccgacacgccactgtagctcaaggccgattaatttcctgttcgaaattggtacgctcccttgtcaaactgcaatattattattgatcgatgcaatggctgcttttgtgtgcgtatataacaagctctggttcgaaacacactctgaagtaggagtagtcattagtaaaattatattttgcgactggaggcacgctgaggagatgccctaagagtgattaaattggggttgctagcttaattaattagaggatatttgctggatttgtcaccgtatagggtcactatgctcgtcttgttaagctattacgagcagattcgtaaatatagtcccgcagactgcagttccccatgaaaacattgggaactcatgatttcaacattttctgagtgaaaattgggctcttgtcattaaaagaaacatctaaaataacaaattaatttcattaaatctagcattgagtatattttgataatatgtttcttttgtattgaaaatactacaatatttttctactataaacttaatcaaacttaaataagtttgactagaaaaaagtcaaacaacttataatataaaacggatggagtatattgcaactattaagaatgtggtactactatatattatccttgcaaaatctacgtccgttgcagaggccaattaactcgccgattctttccacaaatccagtatcagctggaaagaaagagtggcaaggtgcaaattgttaccaaccctgtcaagaccaggccgaagagctcaagatagcgacggcccaacactcgtataattgggccggactgggttgcgtaagagagtggctagcctgtgtatataaaggcctaaccttatgggaatcggtatcgaaaaacattgtactgaaacctctctataattcaaatcccatcatcctcctcctaatcctttgttctttctatcctgaactcttccattcttcctgtctccctctctcgctcttgctcaccaactgttcgacagaaatcccaggaagagttcgtaacaaatttggtatcagagcagtcgaatctggattatctagagaagccacggtatcattcgcgagcgcaactcaaggcgaacgagatggagcagcaacttggcgagctgatgactacgatgacttcaattcagaagcagaacgaggctatcatgatttcggtggaatccatcgaggaaatcaagccgatggttgtggagctagcgggatggaagccgacggtagagaaggtggtggcggaattgcgggacgaggtgggcgacatccgcgctcagctcgagaagatggtgaagcagcccgcgccgtccccaaatcaagtcaagtcggagtccgtcaagccggatcccgtcaagccggaggaaatggctccacgtcttccgacgccgcctggggcaaagcggctgccgaagaggacggtggaaaaccgaccttccacgtcggcgttcggcaaaggagcgcctaggcaattttgccaccacgaggcttcgaatcaccgggggaaggctgtgtggggaaacaactccccacgaactcccccggtcaagggtgcgtataactctacttcccctttccattcagttcctgagtcgagtgggggatgccgtgggtttagttttgg
